(19) United States
(12) Patent Application Publication
(10) Pub. No.: US 2006/0204473 A1
(43) Pub. Date: Sep. 14, 2006

(54) Synthetic hyperglycosylated, and hyperglycosylated protease-resistant polypeptide variants, oral formulations and methods of using the same

(76) Inventors: Lawrence M. Blatt, San Francisco, CA (US); Scott D. Seiwert, Pacifica, CA (US); Jin Hong, Brisbane, CA (US)

Correspondence Address: BOZICEVIC, FIELD & FRANCIS LLP, 1900 UNIVERSITY AVENUE, SUITE 200, EAST PALO ALTO, CA, 94303, US

(21) Appl. No.: 11/351,163

(22) Filed: Feb. 8, 2006

Related U.S. Application Data
(63) Continuation-in-part of application No. 11/330,917, filed on Jan. 11, 2006.
Application No. 11/330,917 is a continuation of application No. 11/200,531, filed on Aug. 8, 2005, now abandoned.
(60) Provisional application No. 60/600,202, filed on Aug. 9, 2004.
(60) Provisional application No. 60/600,134, filed on Aug. 9, 2004.
(60) Provisional application No. 60/604,280, filed on Aug. 24, 2004.
(60) Provisional application No. 60/604,415, filed on Aug. 24, 2004.

(51) Int. Cl. A61K 38/21; C07K 14/56; C07K 14/565; C07K 14/57

(52) U.S. Cl. 424/85.5; 424/85.6; 424/85.7; 530/351

(57) ABSTRACT

The present invention provides synthetic Type I interferon receptor polypeptide agonists comprising consensus or hybrid Type I interferon receptor polypeptide agonists, containing one or more native or non-native glycosylation sites. The present invention provides synthetic Type I interferon receptor polypeptide agonists comprising consensus or hybrid Type I interferon receptor polypeptide agonists, containing one or more native or non-native glycosylation sites, as well as erythropoietin and darbepoetin alfa, each of which are linked to a penetrating peptide that facilitates translocation of a substance across a biological barrier as well as pharmaceutical compositions, including oral formulations, of the same. The present invention further provides oral formulations of hyperglycosylated or protease-resistant, hyperglycosylated polypeptide variants, which polypeptide variants lack at least one protease cleavage site found in a parent polypeptide, and thus exhibit increased protease resistance compared to the parent polypeptide, which polypeptide variants further include (1) a carbohydrate moiety covalently linked to at least one non-native glycosylation site not found in the parent protein therapeutic or (2) a carbohydrate moiety covalently linked to at least one native glycosylation site found but not glycosylated in the parent protein therapeutic. The present invention further provides compositions, including oral pharmaceutical compositions, comprising the synthetic Type I interferon receptor polypeptide agonist, the hyperglycosylated polypeptide variant, or the hyperglycosylated, protease-resistant polypeptide variant. The present invention further provides containers, devices, and kits comprising the synthetic Type I interferon receptor polypeptide agonist, the hyperglycosylated polypeptide variant, or the hyperglycosylated, protease-resistant polypeptide variant. The present invention further provides therapeutic methods involving administering an effective amount of an oral pharmaceutical composition comprising a synthetic Type I interferon receptor polypeptide agonist, a hyperglycosylated polypeptide variant, or a hyperglycosylated, protease-resistant polypeptide variant to an individual in need thereof.

### CROSS-REFERENCE

[0001] This application is a continuation-in-part of U.S. patent application Ser. No. 11/330,917, filed Jan. 11, 2006, which is a continuation of U.S. patent application Ser. No. 11/200,531, filed Aug. 8, 2005; and also claims the benefit of U.S. Provisional Patent Application Nos. 60/600,202, filed Aug. 9, 2004, 60/600,134, filed Aug. 9, 2004, 60/604,280, filed Aug. 24, 2004, and 60/604,415, filed Aug. 24, 2004, each of which applications are incorporated herein by reference in their entirety.

### FIELD OF THE INVENTION

[0002] The present invention is in the field of glycosylated, and glycosylated protease-resistant protein therapeutics.

### BACKGROUND OF THE INVENTION

[0003] The use of proteins as therapeutic agents has gained in clinical importance. Nevertheless, there remain various obstacles and drawbacks to their use, including immunogenicity; destruction of the therapeutic protein by enzymes produced by the host; suboptimal pharmacokinetic properties; and the like. For example, immunogenicity of a therapeutic protein can lead to neutralization of the protein's activity by neutralizing antibodies generated over time in the subject being treated. In addition, immunogenicity of a therapeutic protein can lead to an inflammatory response. Destruction of a therapeutic protein by host enzymes may preclude the use of certain routes of administration. For example, oral administration of therapeutic proteins may be desirable in treating certain conditions; however, the therapeutic protein may be destroyed by enzymes in the gastrointestinal tract of the individual being treated. Furthermore, a therapeutic protein may have a short serum half life, due, e.g., to rapid elimination of the protein by the host reticuloendothelial system; as a consequence, the pharmacokinetic profile of the therapeutic protein may be such that repeated, frequent administration is necessary.

[0004] Many proteins with therapeutic potential include one or more glycosylation sites, e.g., amino acid sequences that are glycosylated by a eukaryotic cell. There have been various reports of attempts to increase the degree of glycosylation of therapeutic proteins in order to achieve 1) reduced immunogenicity; 2) less frequent administration of the protein; 3) increased serum half-life; and 4) reduction in adverse side effects such as inflammation.

[0005] Destruction of a therapeutic protein by host enzymes may preclude the use of certain routes of administration. For example, oral administration of therapeutic proteins may be desirable in treating certain conditions; however, the therapeutic protein may be destroyed by proteolytic enzymes in the gastrointestinal tract and/or in the serum of the individual being treated. Such proteolytic enzymes include, e.g., α-chymotrypsin, carboxypeptidase, endoproteinase Arg-C, endoproteinase Asp-N, endoproteinase Glu-C, endoproteinase Lys-C, and trypsin.

[0006] There is a need in the art for therapeutic proteins in oral dosage forms having suitable pharmacokinetic properties. The present invention addresses this need.

Literature

[0007] U.S. Pat. No. 6,685,933; U.S. Pat. Nos. 4,695,623 and 4,897,471; U.S. Pat. No. 6,703,225; U.S. Pat. No. 6,569,420; U.S. Pat. No. 6,2102,877; U.S. Pat. No. 6,586,398; U.S. Pat. No. 6,531,122; U.S. Pat. No. 6,646,110; Egrie and Brown, Br J Cancer. 2001 April; 84 Suppl 1:3-10; U.S. Pat. No. 6,127,332; WO 00/26354; WO 02/081507; WO 01/36001; U.S. Pat. No. 5,041,376; U.S. Pat. No. 5,520,911; U.S. Pat. No. 6,673,580; U.S. Pat. No. 5,853,724; U.S. Pat. No. 6,132,970; European Patent Application No. 640,619; WO 04/022747; and WO 004/0222593. Nyman et al. (11028) Eur. J. Biochem. 253:485-493; Runkel et al. (11028) Pharmaceutical Research 15:641; Adolf et al. (11020) J. Biol. Chem. 265:9290-9295.

### Sequence Listing

[0008] The present specification incorporates herein by reference, each in its entirety, the sequence information on the Compact Disks (CDs) labeled Copy 1 and Copy 2. The CDs are formatted on IBM-PC, with operating system compatibility with MS-Windows. The files on each of the CDs are as follows:

[0009] Copy 1—Seqlist.txt 1,155 KB created Feb. 8, 2006; and

[0010] Copy 2—Seqlist.txt 1,155 KB created Feb. 8, 2006.

### SUMMARY OF THE INVENTION

[0011] The present invention provides non-native glycosylation sites, oral formulations of polypeptide variants and hyperglycosylated or protease-resistant, hyperglycosylated polypeptide variants, which polypeptide variants comprise at least one mutated protease cleavage site in place of a native protease cleavage site found in a parent polypeptide, and thus exhibit increased protease resistance compared to the parent polypeptide, which polypeptide variants further include (1) a carbohydrate moiety covalently linked to at least one non-native glycosylation site not found in the parent protein therapeutic or (2) a carbohydrate moiety covalently linked to at least one native glycosylation site found but not glycosylated in the parent protein therapeutic. The present invention further provides compositions, including oral pharmaceutical compositions, comprising the hyperglycosylated or protease-resistant, hyperglycosylated polypeptide variants. The present invention further provides nucleic acids comprising nucleotide sequences encoding subject polypeptide agonists; and host cells comprising subject nucleic acids. The present invention further provides methods of treating viral infections, methods of treating fibrotic disorders, and methods of treating proliferative disorders, the methods generally involving administering to an individual in need thereof an effective amount of a subject polypeptide agonist. The present invention further provides containers, devices, and kits comprising the hyperglycosylated or protease-resistant, hyperglycosylated polypeptide variants. The present invention further provides therapeutic methods involving administering an effective amount of an oral pharmaceutical composition comprising a hyperglycosylated or protease-resistant, hyperglycosylated polypeptide variant to an individual in need thereof.

Features of the Invention

[0012] In one aspect, the invention provides oral pharmaceutical compositions comprising a known hyperglycosylated or protease-resistant, hyperglycosylated variant of a parent protein therapeutic.

[0013] In another aspect, the invention provides an oral pharmaceutical composition that contains a first number of moles of the known hyperglycosylated or protease-resistant, hyperglycosylated polypeptide variant in a first unit form, where a parenteral pharmaceutical composition containing a second number of moles of the parent protein therapeutic is proven to be effective in the treatment of a disease in a patient when administered to the patient by subcutaneous bolus injection in an amount where the patient receives the second number of moles of the parent protein therapeutic at a selected dosing interval, where the first number of moles is greater than the second number of moles, and where upon oral administration of the first unit form to the patient, the time required for release of the first number of moles of the hyperglycosylated or protease-resistant, hyperglycosylated variant is no greater than the time period of the selected dosing interval.

[0014] In another aspect, the invention provides an oral pharmaceutical composition that contains a first dose of the hyperglycosylated or protease-resistant, hyperglycosylated polypeptide variant in a first unit form, where a parenteral pharmaceutical composition containing a second dose of the parent protein therapeutic is proven to be effective in the treatment of a disease in a patient when administered to the patient by subcutaneous bolus injection of the second dose at a selected dosing interval, where the amount of the hyperglycosylated or protease-resistant, hyperglycosylated polypeptide variant in moles of drug per kilogram of patient body weight in the first dose is greater than the amount of the parent protein therapeutic in moles of drug per kilogram of patient body weight in the second dose when the first and second doses are calculated for the average patient body weight in the total population of patients suffering from the disease, and where upon oral administration of the first dose to the patient, the time required for release of all of the protease-resistant or protease-resistant, hyperglycosylated variant in the first dose is no greater than the period of time between doses in the selected dosing interval. In some embodiments, the parenteral pharmaceutical composition is proven to be effective in the treatment of the disease in the patient when administered to the patient in a weight-based dose at the selected dosing interval, i.e., the second dose is a weight-based dose and the parenteral pharmaceutical composition is in a form that allows weight-based dosing.

[0015] The present invention further provides therapeutic methods involving administering an effective amount of an oral pharmaceutical composition comprising a hyperglycosylated or protease-resistant, hyperglycosylated polypeptide variant to an individual in need thereof.

[0016] In another aspect, the invention provides a method of treating a disease in a patient comprising administering to the patient an oral pharmaceutical composition comprising a hyperglycosylated or protease-resistant, hyperglycosylated polypeptide variant of a parent protein therapeutic, where the oral pharmaceutical composition is administered orally to the patient in an amount whereby the patient receives a first dose of the hyperglycosylated or protease-resistant, hyperglycosylated polypeptide variant at a first dosing interval, where a parenteral pharmaceutical composition comprising the parent protein therapeutic is proven to be effective in the treatment of the disease in a patient when administered to the patient by subcutaneous bolus injection in an amount whereby the patient receives a second dose of the parent protein therapeutic at a second dosing interval, where the first dose in moles of the protease-resistant or protease-resistant, hyperglycosylated polypeptide variant per kilogram of patient body weight is greater than the second dose in moles of the parent protein therapeutic per kilogram of patient body weight when the first and second doses are calculated for the same patient body weight, and where upon oral administration of the first dose to the patient, the time required for release of all of the protease-resistant or protease-resistant, hyperglycosylated variant in the first dose is no greater than the period of time between doses in the second dosing interval. In some embodiments, the parenteral pharmaceutical composition is proven to be effective in the treatment of the disease in the patient when administered to the patient in a weight-based dose at the second dosing interval, i.e., the second dose is a weight-based dose and the parenteral pharmaceutical composition is in a form that allows weight-based dosing. In some of the foregoing embodiments, the first dose is a weight-based dose and the oral pharmaceutical composition is in a form that allows weight-based dosing.

[0017] In another aspect, the invention provides a method of treating a disease in a patient comprising administering to the patient an oral pharmaceutical composition comprising a hyperglycosylated or protease-resistant, hyperglycosylated polypeptide variant of a parent protein therapeutic, where the oral pharmaceutical composition is administered orally in an amount whereby the patient receives a first dose of the hyperglycosylated or protease-resistant, hyperglycosylated polypeptide variant at a first dosing interval, where a parenteral pharmaceutical composition comprising the parent protein therapeutic is proven to be effective in the treatment of the disease in a patient when administered to the patient by subcutaneous bolus injection in an amount whereby the patient receives a second dose of the parent protein therapeutic at a second dosing interval, where the first dose in moles of the protease-resistant or protease-resistant, hyperglycosylated polypeptide variant per kilogram of patient body weight is greater than the second dose in moles of the parent protein therapeutic per kilogram of patient body weight when the first and second doses are calculated for the same patient body weight, and where the time period between doses in the first dosing interval is the same as or shorter than the time period between doses in the second dosing interval. In some embodiments, the parenteral pharmaceutical composition is proven to be effective in the treatment of the disease in the patient when administered to the patient in a weight-based dose at the second dosing interval, i.e., the second dose is a weight-based dose and the parenteral pharmaceutical composition is in a form that allows weight-based dosing. In some of the foregoing embodiments, the first dose is a weight-based dose and the oral pharmaceutical composition is in a form that allows weight-based dosing.

[0018] In another aspect, the invention provides a method of treating a disease in a patient comprising administering to the patient an oral pharmaceutical composition in a first unit form comprising a first number of moles of a hyperglycosylated or protease-resistant, hyperglycosylated polypeptide variant of a parent protein therapeutic, where the first number of moles of the protease-resistant or protease-resistant, hyperglycosylated polypeptide variant is greater than a second number of moles of the parent protein therapeutic in a parenteral pharmaceutical composition, where the parenteral pharmaceutical composition is an immediate release formulation suitable for subcutaneous bolus injection, where the first unit form is administered orally to the patient at a first dosing interval that is the same as or shorter than a second dosing interval, and where the parent protein therapeutic is proven to be effective in the treatment of the disease in a patient when administered to the patient by subcutaneous bolus injection of the parenteral pharmaceutical composition in an amount whereby the patient receives the second number of moles of the parent protein therapeutic at the second dosing interval.

Further Features of the Invention

[0019] In one aspect, the invention provides for a variant of a parent Type 1 interferon, wherein the variant comprises at least one amino acid substitution compared to the parent Type 1 interferon, wherein the at least one amino acid substitution is selected from the group consisting of D31N, L31S, D31N, K31N, D102N, S102N, T102N, R102N, I102N, D108N, E108N, K108N, E138T, G138T, I138T, L138T, and P138T wherein the at least one amino acid substitution generates a glycosylation site.

[0020] In one aspect of the invention, the parent Type I interferon is selected from the group consisting of interferon α (IFN α), interferon β (IFN β), interferon κ (IFN-κ), interferon ω (IFN ω), interferon τ (IFN τ) and a hybrid Type 1 interferon.

[0021] In one aspect of the invention, the interferon α is interferon alfacon-1 and the variant is selected from the group consisting of [D102N]interferon alfacon-1, [D108N]interferon alfacon-1, [E138N]interferon alfacon-1, [D102N, D108N]interferon alfacon-1, [D102N, E138N]interferon alfacon-1, [D108N, E138N]interferon alfacon-1, and [D102N, D108N, E138N]interferon alfacon-1. In some embodiment, the variant comprises a consensus amino acid sequence as set forth in SEQ ID Nos:2137-2151.

[0022] In one aspect of the invention, the interferon α is interferon α1 and the variant is selected from the group consisting of [D31N]interferon α1, [D102N]interferon α1, [D108N]interferon α1, [G138T]interferon α1, [D31N, D102N]interferon α1, [D31N, D108N]interferon α1, [D31N, G138T]interferon α1, [D102N, D108N]interferon α1, [D102N; G38T]interferon α1, [D108N, G138T]interferon α1, [D31N, D102N, D108N]interferon α1, [D31N, D102N, G138T]interferon α1, [D31N, D108N, G138T]interferon α1, [D102N, D108N, G138T]interferon α1, and [D31N, D102N, D108N, G138T]interferon α1. In some embodiments, the variant comprises an amino acid sequence as set forth in any one of SEQ ID Nos:1407-1421.

[0023] In one aspect of the invention, the interferon α is interferon α2a and the variant is selected from the group consisting of [D31N]interferon α2a, [D102N]interferon α2a, [D108N]interferon α2a, [D31N, D102N]interferon α2a, [D31N, D108N]interferon α2a, [D102N, D108N]interferon α2a, [D31N, D102N, D108N]interferon α2a. In some embodiments, the variant comprises an amino acid sequence as set forth in any one of SEQ ID Nos:1423-1433.

[0024] In one aspect of the invention, the interferon α is interferon α2b and the variant is selected from the group consisting of [D31N]interferon α2b, [D102N] interferon α2b, [D108N]interferon α2b, [D31N, D102N]interferon α2b, [D31N, D108N]interferon α2b, [D102N, D108N]interferon α2b, [D31N, D102N, D108N]interferon α2b. In some embodiments, the variant comprises an amino acid sequence as set forth in any one of SEQ ID Nos:1439-1449.

[0025] In one aspect of the invention, the interferon α is interferon α4a and the variant is selected from the group consisting of [D31N]interferon α4a, [D102N]interferon α4a, [E108N]interferon α4a, [E138T]interferon α4a, [D31N, D102N]interferon α4a, [D31N, E108N]interferon α4a, [D31N, E138T]interferon α4a, [D102N, E108N]interferon α4a, [D102N, E138T]interferon α4a, [E108N, E138T]interferon α4a, [D31N, D102N, E108N]interferon α4a, [D31N, D102N, E138T]interferon α4a, [D31N, E108N, E138T]interferon α4a, [D102N, E108N, E138T]interferon α4a, and [D31N, D102N, E108N, E138T]interferon α4a. In some embodiments, the variant comprises an amino acid sequence as set forth in any one of SEQ ID Nos: 1455-1469.

[0026] In one aspect of the invention, the interferon α is interferon α4b and the variant is selected from the group consisting of [D31N] interferon α4b, [D102N] interferon α4b, [E108N]interferon α4b, [E138T]interferon α4b, [D31N, D102N]interferon α4b, [D31N, E108N]interferon α4b, [D31N, E138T]interferon α4b, [D102N, E108N]interferon α4b, [D102N, E138T]interferon α4b, [E108N, E138T]interferon α4b, [D31N, D102N, E108N]interferon α4b, [D31N, D102N, E138T]interferon α4b, [D31N, E108N, E138T]interferon α4b, [D102N, E108N, E138T]interferon α4b, and [D31N, D102N, E108N, E138T]interferon α4b. In some embodiments, the variant comprises an amino acid sequence as set forth in any one of SEQ ID Nos:1471-1485.

[0027] In one aspect of the invention, the interferon α is interferon α5 and the variant is selected from the group consisting of [D31N]interferon α5, [D102N]interferon α5, [D108N]interferon α5, [E138T]interferon α5, [D31N, D102N]interferon α5, [D31N, D108N]interferon α5, [D31N, E138T]interferon α5, [D102N, D108N]interferon α5, [D102N, E138T]interferon α5, [D108N, E138T]interferon α5, [D31N, D102N, D108N]interferon α5, [D31N, D102N, E138T]interferon α5, [D31N, D108N, E138T]interferon α5, [D102N, D108N, E138T]interferon α5, and [D31N, D102N, D108N, E138T]interferon α5. In some embodiments, the variant comprises an amino acid sequence as set forth in any one of SEQ ID Nos:1487-1501.

[0028] In one aspect of the invention, the interferon α is interferon α6 and the variant is selected from the group consisting of [D31N]interferon α6, [D102N]interferon α6, [D108N]interferon α6, [G138T]interferon α6, [D31N, D102N]interferon α6, [D31N, D108N]interferon α6, [D31N, G138T]interferon α6, [D102N, D108N]interferon α6, [D102N, G138T]interferon α6, [D108N, E138T]interferon α6, [D31N, D102N, D108N]interferon α6, [D31N, D102N, G138T]interferon α6, [D31N, D108N, G138T]interferon α6, [D102N, D108N, G138T]interferon α6, and [D31N, D102N, D108N, G138T]interferon α6. In some embodiments, the variant comprises an amino acid sequence as set forth in any one of SEQ ID Nos:1503-1517.

[0029] In one aspect of the invention, the interferon α is interferon α7 and the variant is selected from the group consisting of [D31N]interferon α7, [D102-N]interferon α7, [E108N]interferona7, [E138T]interferona7, [D31N, D102N]interferona7, [D31N, E108N]interferon α7, [D31N, E138T]interferon α7, [D102N, E108N]interferon α7, [D102N, E138T]interferon α7, [D108N, E138T]interferon α7, [D31N, D102N, E108N]interferon α7, [D31N, D102N, E138T]interferon α7, [D31N, E108N, E138T]interferon α7, [D102N, E108N, E138T]interferon α7, and [D31N, D102N, E108N, E138T]interferon α7. In some embodiments, the variant comprises an amino acid sequence as set forth in any one of SEQ ID Nos:1519-1533.

[0030] In one aspect of the invention, the interferon α is interferon α8 and the variant is selected from the group consisting of [D31N]interferon α8, [D102N]interferon α8, [D108N]interferon α8, [I138T]interferon α8, [D31N, D102N]interferon α8, [D31N, D108N]interferon α8, [D31N, I138T]interferon α8, [D102N, D108N]interferon α8, [D102N, I138T]interferon α8, [D108N, I138T]interferon α8, [D31N, D102N, D108N]interferon α8, [D31N, D102N, I138T]interferon α8, [D31N, D108N, I138T]interferon α8, [D102N, D108N, I138T]interferon α8, and [D31N, D102N, D108N, I138T]interferon α8. In some embodiments, the variant comprises an amino acid sequence as set forth in any one of SEQ ID Nos:1535-1549.

[0031] In one aspect of the invention, the interferon α is interferon α10 and the variant is selected from the group consisting of [D31N]interferon α10, [D102N]interferon 10, [E108N]interferon α10, [E138T]interferon α10, [D31N, D102N]interferon α10, [D31N, E108N]interferon α10, [D31N, E138T]interferon α10, [D102N, E108N]interferon α10, [D102N, E138T]interferon α10, [D108N, E138T]interferon α10, [D31N, D102N, E108N]interferon α10, [D31N, D102N, E138T]interferon α10, [D31N, E108N, E138T]interferon α10, [D102N, E108N, E138T]interferon α10, and [D31N, D102N, E108N, E138T]interferon α10. In some embodiments, the variant comprises an amino acid sequence as set forth in any one of SEQ ID Nos:1551-1565.

[0032] In one aspect of the invention, the interferon α is interferon α 13 and the variant is selected from the group consisting of [D31N] interferon α113, [D102N] interferon α13, [D108N]interferon α13, [G138T]interferon α13, [D31N, D102N]interferon α13, [D31N, D108N]interferon α13, [D31N, G138T]interferon α13, [D102N, D108N]interferon α13, [D102N, G138T]interferon α13, [D108N, E138T]interferon α13, [D31N, D102N, D108N]interferon α13, [D31N, D102N, G138T]interferon α13, [D31N, D108N, G138T]interferon α13, [D102N, D108N, G138T]interferon α13, and [D31N, D102N, D108N, G138T]interferon α13. In some embodiments, the variant comprises an amino acid sequence as set forth in any one of SEQ ID Nos:1567-1581.

[0033] In one aspect of the invention, the interferon α is interferon α14 and the variant is selected from the group consisting of [D108N]interferon α14, [E138T]interferon α14, and [D108N, E138T]interferon α14. In some embodiments, the variant comprises an amino acid sequence as set forth in any one of SEQ ID Nos:1585-1592.

[0034] In one aspect of the invention, the interferon α is interferon α16 and the variant is selected from the group consisting of [D31N]interferon α16, [D102N]interferon α16, [D108N]interferon α16, [E138T]interferon α16, [D31N, D102N]interferon α16, [D31N, D108N]interferon α16, [D31N, E138T]interferon α16, [D102N, D108N]interferon α16, [D102N, E138T]interferon α16, [D108N, E138T]interferon α16, [D31N, D102N, D108N]interferon α16, [D31N, D102N, E138T]interferon α16, [D31N, D108N, E138T]interferon α16, [D102N, D108N, E138T]interferon α16, and [D31N, D102N, D108N, E138T]interferon α16. In some embodiments, the variant comprises an amino acid sequence as set forth in any one of SEQ ID Nos:1599-1613.

[0035] In one aspect of the invention, the interferon α is interferon α 17 and the variant is selected from the group consisting of [D31N]interferon α17, [D102N]interferon α17, [E108N]interferon α17, [E138T]interferon α17, [D31N, D102N]interferon α17, [D31N, E108N]interferon α17, [D31N, E138T]interferon α17, [D102N, E108N]interferon α17, [D102N, E138T]interferon α17, [D108N, E138T]interferon α17, [D31N, D102N, E108N]interferon α17, [D31N, D102N, E138T]interferon α17, [D31N, E108N, E38T]interferon α17, [D102N, E108N, E138T]interferon α17, and [D31N, D102N, E108N, E138T]interferon α17. In some embodiments, the variant comprises an amino acid sequence as set forth in any one of SEQ ID Nos:1615-1629.

[0036] In one aspect of the invention, the interferon α is interferon α21 and the variant is selected from the group consisting of [D31N] interferon α21, [D102N] interferon α21, [E108N]interferon α21, [E138T]interferon α21, [D31N, D102N]interferon α21, [D31N, E108N]interferon α21, [D31N, E138T]interferon α21, [D102N, E108N]interferon α21, [D102N, E138T]interferon α21, [D108N, E138T]interferon α21, [D31N, D102N, E108N]interferon α21, [D31N, D102N, E138T]interferon α21, [D31N, E108N, E138T]interferon α21, [D102N, E108N, E138T]interferon α21, and [D31N, D102N, E108N, E138T]interferon α21. In some embodiments, the variant comprises an amino acid sequence as set forth in any one of SEQ ID Nos:1631-1645.

[0037] In one aspect of the invention, the interferon α is interferon aH and the variant is selected from the group consisting of [D108N]interferon aH, [E138T]interferon aH, and [D108N, E138T]interferon aH. In some embodiments, the variant comprises an amino acid sequence as set forth in any one of SEQ ID Nos:1649-1656.

[0038] In one aspect of the invention, the interferon α is interferon αI and the variant is selected from the group consisting of [D31N]interferon αI, [D102N]interferon αI, [E108N]interferon αI, [E138T]interferon αI, [D31N, D102N]interferon αI, [D31N, E108N]interferon αI, [D31N, E138T]interferon αI, [D102N, E108N]interferon αI, [D102N, E138T]interferon αI, [D108N, E138T]interferon αI, [D31N, D102N, E108N]interferon αI, [D31N, D102N, E138T]interferon αI, [D31N, E108N, E138T]interferon αI, [D102N, E108N, E138T]interferon αI, and [D31N, D102N, E108N, E138T]interferon αI. In some embodiments, the variant comprises an amino acid sequence as set forth in any one of SEQ ID Nos:1663-1677.

[0039] In one aspect of the invention, interferon α is interferon αJ1 and the variant is selected from the group consisting of [D31N]interferon αJ1, [D102N]interferon αJ1, [E108N]interferon αJ1, [E138T]interferon αJ1, [D31N, D102N]interferon αJ1, [D31N, E108N]interferon αJ1, [D31N, E138T]interferon αJ1, [D102N, E108N]interferon αJ1, [D102N, E138T]interferon αJ1, [D108N, E138T]interferon αJ1, [D31N, D102N, E108N]interferon αJ1, [D31N, D102N, E138T]interferon αJ1, [D31N, E108N, E138T]interferon αJ1, [D102N, E108N, E138T]interferon αj1, and [D31N, D102N, E108N, E138T]interferon αJ1. In some embodiments, the variant comprises an amino acid sequence as set forth in any one of SEQ ID Nos: 1678-1693.

[0040] In one aspect of the invention, the variant is selected from the group consisting of [L31S]interferon-β, [S102N]interferon-β, [E138T]interferon-β, [L31S, S102N]interferon-β, [L31S, E138T]interferon-β, [S102N, E138T]interferon-β, and [L31S, S102N, E138T]interferon-β. In some embodiments, the variant comprises an amino acid sequence as set forth in any one of SEQ ID Nos:1695-1706.

[0041] In one aspect of the invention, the variant is selected from the group consisting of [L31S]interferon κ, [T102N]interferon κ, [K108N]interferon κ, [P138T]interferon κ, [L31S, T102N]interferon κ, [L31S, K108N]interferon κ, [L31S, P138T]interferon κ, [T102N, K108N]interferon κ, [T102N, P138T]interferon κ, [K108N, P138T]interferon K, [L31S, T102N, K108N]interferon κ, [L31S, T102N, P138T]interferon κ, [L31S, K108N, P138T]interferon κ, [T102N, K108N, P138T]interferon κ, and [L31S, T102N, K108N, P138T]interferon κ. In some embodiments, the variant comprises an amino acid sequence as set forth in any one of SEQ ID Nos:1711-1725.

[0042] In one aspect of the invention, the variant is selected from the group consisting of [D31N]interferon ω, [R102N]interferon ω, [G138T]interferon c, [D31N, R102N]interferon ω, [D31N, G138T]interferon ω, [R102N, G138T]interferon ω, [D31N, R102N, G138T]interferon ω. In some embodiments, the variant comprises an amino acid sequence as set forth in any one of SEQ ID Nos:1727-1738.

[0043] In one aspect of the invention, the variant is selected from the group consisting of [K31N]interferon τ, [I102N]interferon τ, [E108N]interferon τ, [L138T]interferon τ, [K31N, I102N]interferon τ, [K31N, E108N]interferon τ, [K31N, L138T]interferon τ, [I102N, E108N]interferon τ, [I102N, L138T]interferon τ, [E108N, L138T]interferon τ, [K31N, I102N, E108N]interferon τ, [K31N, I102N, L138T]interferon τ, [K31N, E108N, L138T]interferon τ, [I102N, E108N, L138T]interferon τ, and [K31N, I102N, E108N, L138T]interferon τ. In some embodiments, the variant comprises an amino acid sequence as set forth in any one of SEQ ID Nos:1743-1757.

[0044] In one aspect of the invention, the variant comprises a carbohydrate moiety covalently linked to a non-native glycosylation site.

[0045] In one aspect of the invention, a polypeptide comprising a carrier peptide set forth in Table 9 wherein the polypeptide is a native Type 1 interferon comprising an amino acid sequence as set forth in any one of SEQ ID Nos:1406, 1422, 1438, 1454, 1470, 1486, 1502, 1518, 1534, 1550, 1566, 1582, 1598, 1614, 1630, 1646, 1662, 1678, 1694, 1710, 1726, 1742, and 1758. In some embodiments, the polypeptide binds erythropoietin receptor. In some embodiments, the polypeptide comprises an amino acid sequence as set forth in SEQ ID Nos:1774-1775.

[0046] In one aspect, the invention provides for the above described variants wherein the variant comprises a carrier peptide set forth in Table 9.

[0047] In one aspect, the invention provides for a pharmaceutical composition comprising the above described variants, and a pharmaceutically acceptable excipient. In some embodiments, the pharmaceutically-acceptable excipient is suitable for oral delivery. In some embodiments, the pharmaceutically-acceptable excipient is suitable for parenteral delivery.

[0048] In one aspect, the invention provides for a polynucleotide comprising a nucleotide sequence encoding any of the above described variants. In some embodiments, the polynucleotide comprises codons corresponding to mammalian codon usage bias.

[0049] In one aspect, the invention provides for an expression vector comprising the above described polynucleotides operably linked to a promoter functional in a eukaryotic cell.

[0050] In one aspect, the invention provides for a host cell comprising the above described polynucleotides.

[0051] In one aspect, the invention provides for a host cell comprising the above described expression vector.

[0052] In one aspect, the invention provides for the above described host cells, wherein the host cell is a eukaryotic cell.

[0053] In one aspect, the invention provides for a method for producing the above described variants, the method comprising: culturing the above described host cell under conditions that favor production of the variant; and isolating the synthetic Type I interferon receptor polypeptide agonist from the culture.

[0054] In one aspect, the invention provides for a method of treating a disorder amenable to treatment with a Type 1 interferon, the method comprising administering to an individual in need thereof a therapeutically effective amount of one of the above described variants.

[0055] In one aspect, the invention provides for a method of prophylactically treating a disorder amenable to treatment with a Type 1 interferon, the method comprising administering to an individual in need thereof a prophylactically effective amount of one of the above described variants. In some embodiments, the disorder is a fibrotic disorder. In some embodiments, the disorder is cancer. In some embodiments, the disorder is multiple sclerosis. In some embodiments, the variant is a variant of a parent interferon-β. In some embodiments, the cancer is selected from the group consisting of malignant melanoma, renal cell carcinoma, multiple myeloma and leukemia. In some embodiments, the disorder is a viral infection. In some embodiments, the viral infection is caused by a virus of family Flaviviridae. In some embodiments, the virus of family Flaviviridae is selected from the group consisting of yellow fever virus, West Nile virus, dengue fever virus, and hepatitis C virus. In some embodiments, the virus of family Flaviviridae is hepatitis C virus.

[0056] In one aspect, the invention provides for a therapeutically effective amount of one of the above described variants administered to the individual at a dosing interval selected from the group consisting of once a week, twice a week, and three times a week. In some embodiments, the therapeutically effective amount is administered to the individual at a dosing interval of once a week. In some embodiments, the therapeutically effective amount is administered to the individual on one occasion. In some embodiments, the therapeutically effective amount is administered to the individual by subcutaneous injection. In some embodiments, the therapeutically effective amount is administered to the individual intravenously. In some embodiments, the therapeutically effective amount is administered to the individual orally. In some embodiments, the therapeutically effective amount is administered to the individual intramuscularly.

[0057] In one aspect, the invention provides for the above described embodiments, wherein the individual is a human.

### BRIEF DESCRIPTION OF THE DRAWINGS

[0058] FIG. 1 depicts an amino acid sequence of human mature IFN-α2a.

[0059] FIG. 2 depicts an amino acid sequence of human mature IFN-α2b.

[0060] FIG. 3 depicts an amino acid sequence of human IFN-β.

[0061] FIG. 4 depicts an amino acid sequence of native human IFN-γ.

[0062] FIG. 5 depicts an amino acid sequence of G-CSF.

[0063] FIG. 6 depicts an amino acid sequence of human growth hormone.

[0064] FIG. 7 depicts an amino acid sequence of erythropoietin.

[0065] FIG. 8 depicts an amino acid sequence of GM-CSF.

[0066] FIG. 9 depicts an amino acid sequence of a consensus IFN-α.

[0067] FIG. 10 depicts an amino acid sequence of IFN-α.

[0068] FIG. 11 depicts an amino acid sequence of IFN-α2c.

[0069] FIG. 12 depicts an amino acid sequence of IFN-αd.

[0070] FIG. 13 depicts an amino acid sequence of IFN-α5.

[0071] FIG. 14 depicts an amino acid sequence of IFN-α6.

[0072] FIG. 15 depicts an amino acid sequence of IFN-α4.

[0073] FIG. 16 depicts an amino acid sequence of IFN-α4b.

[0074] FIG. 17 depicts an amino acid sequence of IFN-αI.

[0075] FIG. 18 depicts an amino acid sequence of IFN-αJ.

[0076] FIG. 19 depicts an amino acid sequence of IFN-αH.

[0077] FIG. 20 depicts an amino acid sequence of IFN-αF.

[0078] FIG. 21 depicts an amino acid sequence of IFN-α8.

[0079] FIG. 22 depicts an amino acid sequence of IFN-β1.

[0080] FIG. 23 depicts an amino acid sequence of IFN-β2a.

[0081] FIG. 24 depicts an amino acid sequence comparison of Infergen (SEQ ID NO:1356) and Type I Interferon species (human IFN-α2b, SEQ ID NO:1357; human IFN-α14, SEQ ID NO:1358; human IFN-β1, SEQ ID NO:1359; human IFN-ω1, SEQ ID NO:1360) that have been reported to be glycosylated naturally. The amino acid residues where the glycosylations occur are labeled with bold outlined boxes. The asparagines residues are the anchoring site for N-linked glycosylation and the threonine residue is the anchoring site for O-linked glycosylation. FIG. 24 also depicts a majority sequence (SEQ ID NO:1355) based on the comparison.

[0082] FIG. 25 depicts an amino acid sequence comparison of amino acids 61-120 of Infergen (SEQ ID NO:1362) and exemplary synthetic Type I interferon receptor polypeptide agonists. Sites 1, 2 and 3 are examples of positions where glycosylation sites are created. N-linked glycosylation sites are generated at Sites 1 and 2. Both N-linked and O-linked glycosylation sites are generated at Site 3.

[0083] FIG. 26 depicts a synthetic mammalian Infergen nucleic acid sequence with preferred mammalian codon usage; and the translated open reading frame. The open reading frame is indicated with translated Infergen amino acid sequence (SEQ ID NO: 1356). Six pairs of complementary primers from A to F are shown in alternating italics and bold text. The upper sense strands of the primer pairs are identified with odd number and lower non-sense strands are identified with even number. In the region upstream of the start codon ATG, a short sequence of GCCACC, the Kozak consensus sequence, is designed to increase eukaryotic translation efficiency. Two tandem stop codons—TAA and TGA—are used to ensure complete termination of translation.

[0084] FIG. 27 depicts a comparison of the nucleic acid sequences of mammalian Infergen and glycosylated mutants thereof. The nucleotides that differ are shown in boxes. Codons used based on the preferred codon usage set forth in Table 8.

[0085] FIG. 28 depicts an amino acid sequence comparison of amino acids 81-140 of human IFN-β1 (SEQ ID NO:1391) and exemplary glycosylated variants of human IFN-β1. Sites 1 and 2 are the positions where glycosylation mutants are generated. In general, only N-linked glycosylation sites are created at Site 1. Both N-linked and O-linked glycosylation sites are generated at Site 2. The naturally occurring N-linked glycosylation sites in human IFN-β1 and mutants are shown in boxes.

[0086] FIG. 29 depicts an amino acid sequence comparison of amino acids 81-140 of human IFN-α1 (SEQ ID NO:1398) and exemplary glycosylated variants of human IFN-ω1. Sites 1 and 2 are the positions where glycosylation mutants are generated. In general, only N-linked glycosylation sites are created at Site 1. Both N-linked and O-linked glycosylation sites are generated at Site 2. The naturally occurring N-linked glycosylation sites in human IFN-ω1 and mutants are shown in boxes.

[0087] FIG. 30 depicts an amino acid sequence alignment of Infergen (SEQ ID NO:1356), human IFN-α14 (SEQ ID NO:1358), human IFN-11 (SEQ ID NO:1359), and exemplary fusion proteins with human IFN-α14 and human IFN-β signal peptides (SEQ ID NOs:1388 and 1389, respectively). The majority sequence is shown above (SEQ ID NO:1387).

[0088] FIG. 31 depicts the amino acid sequence of mature, native human IFN-γ (SEQ ID NO:1404).

[0089] FIG. 32 depicts Western blot analysis of exemplary proteins synthesized by Cos-7 cells.

[0090] FIG. 33 depicts the amino acid and nucleic sequences of Type 1 interferons, Type 1 interferon glycosylation variants, erythropoeitin, and darbepoetin alfa (SEQ ID NOs:1406-2153).

### DEFINITIONS

[0091] The term “polypeptide” refers to a polymer of amino acids and does not refer to a specific length of the product; thus, peptides, oligopeptides, and proteins are included within the definition of polypeptide. This term also does not refer to or exclude post-translational modifications of the polypeptide, for example, glycosylations, acetylations, phosphorylations and the like. Included within the term “polypeptide” are, for example, polypeptides containing one or more analogs of an amino acid (including, for example, unnatural amino acids, non-coded amino acids, etc.), polypeptides with substituted linkages, as well as other modifications known in the art, both naturally occurring and non-naturally occurring. The term “polypeptide” includes fusion proteins, including, but not limited to, fusion proteins with a heterologous amino acid sequence, fusions with heterologous and homologous leader sequences, with or without N-terminal methionine residues; immunologically tagged proteins; and the like.

[0092] The terms “polynucleotide” and “nucleic acid molecule” are used interchangeably herein to refer to polymeric forms of nucleotides of any length. The polynucleotides may contain deoxyribonucleotides, ribonucleotides, and/or their analogs. Nucleotides may have any three-dimensional structure, and may perform any function, known or unknown. The term “polynucleotide” includes single-, double-stranded and triple helical molecules. “Oligonucleotide” generally refers to polynucleotides of between about 5 and about 100 nucleotides of single- or double-stranded DNA. However, for the purposes of this disclosure, there is no upper limit to the length of an oligonucleotide. Oligonucleotides are also known as oligomers or oligos and may be isolated from genes, or chemically synthesized by methods known in the art. The term “polynucleotide” includes double-stranded DNA found, inter alia, in linear DNA molecules (e.g., restriction fragments), viruses, plasmids, and chromosomes.

[0093] The following are non-limiting embodiments of polynucleotides: a gene or gene fragment, exons, introns, mRNA, tRNA, rRNA, ribozymes, cDNA, recombinant polynucleotides, branched polynucleotides, plasmids, vectors, isolated DNA of any sequence, isolated RNA of any sequence, nucleic acid probes, and primers. A nucleic acid molecule may also comprise modified nucleic acid molecules, such as methylated nucleic acid molecules and nucleic acid molecule analogs. Analogs of purines and pyrimidines are known in the art. Nucleic acids may be naturally occurring, e.g. DNA or RNA, or may be synthetic analogs, as known in the art. Such analogs may be preferred for use as probes because of superior stability under assay conditions. Modifications in the native structure, including alterations in the backbone, sugars or heterocyclic bases, have been shown to increase intracellular stability and binding affinity. Among useful changes in the backbone chemistry are phosphorothioates; phosphorodithioates, where both of the non-bridging oxygens are substituted with sulfur; phosphoroamidites; alkyl phosphotriesters and boranophosphates. Achiral phosphate derivatives include 3′-O′-5′-S-phosphorothioate, 3′-S-5′-O-phosphorothioate, 3′-CH₂-5′-O-phosphonate and 3′-NH-5′-O-phosphoroamidate. Peptide nucleic acids replace the entire ribose phosphodiester backbone with a peptide linkage.

[0094] A polynucleotide or polypeptide has a certain percent “sequence identity” to another polynucleotide or polypeptide, meaning that, when aligned, that percentage of bases or amino acids are the same when comparing the two sequences. Sequence similarity can be determined in a number of different manners. To determine sequence identity, sequences can be aligned using the methods and computer programs, including BLAST, available over the world wide web at ncbi.nlm.nih.gov/BLAST. See, e.g., Altschul et al. (11020), J. Mol. Biol. 215:403-10. Another alignment algorithm is FASTA, available in the Genetics Computing Group (GCG) package, from Madison, Wis., USA, a wholly owned subsidiary of Oxford Molecular Group, Inc. Other techniques for alignment are described in Methods in Enzymology, vol. 266: Computer Methods for Macromolecular Sequence Analysis (11026), ed. Doolittle, Academic Press, Inc., a division of Harcourt Brace & Co., San Diego, Calif., USA. Of particular interest are alignment programs that permit gaps in the sequence. The Smith-Waterman is one type of algorithm that permits gaps in sequence alignments. See Meth. Mol. Biol. 70: 173-187 (11027). Also, the GAP program using the Needleman and Wunsch alignment method can be utilized to align sequences. See J. Mol. Biol. 48: 443-453 (1970)

[0095] The term “host cell” includes an individual cell or cell culture, which can be or has been a recipient of any recombinant vector(s) or synthetic or exogenous polynucleotide. Host cells include progeny of a single host cell, and the progeny may not necessarily be completely identical (in morphology or in total DNA complement) to the original parent cell due to natural, accidental, or deliberate mutation and/or change. A host cell includes cells transfected or infected in vivo or in vitro with a recombinant vector or a synthetic or exogenous polynucleotide. A host cell which comprises a recombinant vector of the invention is a “recombinant host cell.” In some embodiments, a host cell is a prokaryotic cell. In other embodiments, a host cell is a eukaryotic cell.

[0096] The terms “DNA regulatory sequences,” and “regulatory elements,” used interchangeably herein, refer to transcriptional and translational control sequences, such as promoters, enhancers, polyadenylation signals, terminators, protein degradation signals, and the like, that provide for and/or regulate expression of a coding sequence and/or production of an encoded polypeptide in a host cell.

[0097] The term “transformation” is used interchangeably herein with “genetic modification” and refers to a permanent or transient genetic change induced in a cell following introduction of new nucleic acid (i.e., DNA exogenous to the cell). Genetic change (“modification”) can be accomplished either by incorporation of the new DNA into the genome of the host cell, or by transient or stable maintenance of the new DNA as an episomal element. Where the cell is a mammalian cell, a permanent genetic change is generally achieved by introduction of the DNA into the genome of the cell.

[0098] The term “operably linked,” as used herein, refers to a juxtaposition wherein the components so described are in a relationship permitting them to function in their intended manner. For instance, a promoter is operably linked to a coding sequence if the promoter effects transcription or expression of the coding sequence.

[0099] The term “construct,” as used herein, refers to a recombinant nucleic acid, generally recombinant DNA, that has been generated for the purpose of the expression of a specific nucleotide sequence(s), or is to be used in the construction of other recombinant nucleotide sequences.

[0100] As used herein, the terms “treatment,” “treating,” and the like, refer to obtaining a desired pharmacologic and/or physiologic effect. The effect may be prophylactic in terms of completely or partially preventing a disease or symptom thereof and/or may be therapeutic in terms of a partial or complete cure for a disease and/or adverse affect attributable to the disease. “Treatment,” as used herein, covers any treatment of a disease in a mammal, particularly in a human, and includes: (a) increasing survival time; (b) decreasing the risk of death due to the disease; (c) preventing the disease from occurring in a subject which may be predisposed to the disease but has not yet been diagnosed as having it; (d) inhibiting the disease, i.e., arresting its development (e.g., reducing the rate of disease progression); and (e) relieving the disease, i.e., causing regression of the disease.

[0101] The terms “individual,” “host,” “subject,” and “patient,” used interchangeably herein, refer to a mammal, including primates, rodents, livestock, pets, horses, etc. In some embodiments, an individual is a human.

[0102] The term “therapeutically effective amount” is meant an amount of a therapeutic agent, or a rate of delivery of a therapeutic agent, effective to facilitate a desired therapeutic effect. The precise desired therapeutic effect will vary according to the condition to be treated, the formulation to be administered, and a variety of other factors that are appreciated by those of ordinary skill in the art.

[0103] As used herein, the terms “proven to be effective” in the context of a drug therapy for treatment of a disease, or any language of similar meaning, shall be understood to mean that the drug therapy so described was found to be safe and effective, alone or in combination with one or more additional pharmaceutical agent(s), for the treatment of the disease in a controlled clinical trial or set of clinical trials that achieved one or more of the primary clinical endpoints of the trial(s) with a statistical significance of p≦0.05. Typically, drug therapies proven to be effective for a drug include: (1) any treatment indication(s) for the drug specified in a license to market the drug granted by a regulatory authority; and (2) any treatment indication(s) for the drug described in a statement issued by a generally recognized body of medical experts (e.g. an NIH Consensus Statement).

[0104] The term “binds specifically,” in the context of antibody binding, refers to high avidity and/or high affinity binding of an antibody to a specific polypeptide i.e., epitope of a polypeptide, e.g., a subject synthetic Type I interferon receptor polypeptide agonist. For example, antibody binding to an epitope on a specific a subject synthetic Type I interferon receptor polypeptide agonist or fragment thereof is stronger than binding of the same antibody to any other epitope, particularly those which may be present in molecules in association with, or in the same sample, as the specific polypeptide of interest, e.g., binds more strongly to a specific subject synthetic Type I interferon receptor polypeptide agonist epitope than to any other Type I interferon receptor polypeptide agonist epitope so that by adjusting binding conditions the antibody binds almost exclusively to the specific subject synthetic Type I interferon receptor polypeptide agonist epitope and not to any other Type I interferon receptor polypeptide agonist epitope, or to any other polypeptide which does not comprise the epitope. Antibodies that bind specifically to a polypeptide may be capable of binding other polypeptides at a weak, yet detectable, level (e.g., 10% or less of the binding shown to the polypeptide of interest). Such weak binding, or background binding, is readily discernible from the specific antibody binding to a subject polypeptide, e.g. by use of appropriate controls. In general, specific antibodies bind to a given polypeptide with a binding affinity of 10⁻⁷ M or more, e.g., 10⁻⁸ M or more (e.g., 10⁻⁹ M, 10⁻¹⁰ M, 10⁻¹¹ M, etc.). In general, an antibody with a binding affinity of 10⁻⁶ M or less is not useful in that it will not bind an antigen at a detectable level using conventional methodology currently used.

[0105] A “fibrotic condition,” “fibrotic disease” and “fibrotic disorder” are used interchangeably to refer to a condition, disease or disorder that is amenable to treatment by administration of a compound having anti-fibrotic activity. Fibrotic disorders include, but are not limited to, pulmonary fibrosis, including idiopathic pulmonary fibrosis (IPF) and pulmonary fibrosis from a known etiology, liver fibrosis, and renal fibrosis. Other exemplary fibrotic conditions include musculoskeletal fibrosis, cardiac fibrosis, post-surgical adhesions, scleroderma, glaucoma, and skin lesions such as keloids.

[0106] The term “proliferative disorder” and “proliferative disease” are used interchangeably to refer to any disease or condition characterized by pathological cell growth or proliferation, particularly cancer.

[0107] The terms “cancer,” “neoplasm,” and “tumor” are used interchangeably herein to refer to cells that exhibit relatively autonomous growth, so that they exhibit an aberrant growth phenotype characterized by a significant loss of control of cell proliferation. Cancerous cells can be benign or malignant.

[0108] The term “hepatitis virus infection” refers to infection with one or more of hepatitis A, B, C, D, or E virus, with blood-borne hepatitis viral infection being of particular interest, particularly hepatitis C virus infection.

[0109] The term “sustained viral response” (SVR; also referred to as a “sustained response” or a “durable response”), as used herein, refers to the response of an individual to a treatment regimen for HCV infection, in terms of serum HCV titer. Generally, a “sustained viral response” refers to no detectable HCV RNA (e.g., less than about 500, less than about 200, or less than about 100 genome copies per milliliter serum) found in the patient's serum for a period of at least about one month, at least about two months, at least about three months, at least about four months, at least about five months, or at least about six months following cessation of treatment.

[0110] The term “treatment failure patients” (or “treatment failures”) as used herein generally refers to HCV-infected patients who failed to respond to previous therapy for HCV (referred to as “non-responders”) or who initially responded to previous therapy, but in whom the therapeutic response was not maintained (referred to as “relapsers”). The previous therapy generally can include treatment with IFN-α monotherapy or IFN-α combination therapy, where the combination therapy may include administration of IFN-α and an antiviral agent such as ribavirin.

[0111] The term “dosing event” as used herein refers to administration of an antiviral agent to a patient in need thereof, which event may encompass one or more releases of an antiviral agent from a drug dispensing device. Thus, the term “dosing event,” as used herein, includes, but is not limited to, installation of a continuous delivery device (e.g., a pump or other controlled release injectable system); and a single subcutaneous injection followed by installation of a continuous delivery system.

[0112] “Patterned” or “temporal” as used in the context of drug delivery is meant delivery of drug in a pattern, generally a substantially regular pattern, over a pre-selected period of time (e.g., other than a period associated with, for example a bolus injection). “Patterned” or “temporal” drug delivery is meant to encompass delivery of drug at an increasing, decreasing, substantially constant, or pulsatile, rate or range of rates (e.g., amount of drug per unit time, or volume of drug formulation for a unit time), and further encompasses delivery that is continuous or substantially continuous, or chronic.

[0113] The term “controlled drug delivery device” is meant to encompass any device wherein the release (e.g., rate, timing of release) of a drug or other desired substance contained therein is controlled by or determined by the device itself and not substantially influenced by the environment of use, or releasing at a rate that is reproducible within the environment of use.

[0114] By “substantially continuous” as used in, for example, the context of “substantially continuous infusion” or “substantially continuous delivery” is meant to refer to delivery of drug in a manner that is substantially uninterrupted for a pre-selected period of drug delivery, where the quantity of drug received by the patient during any 8 hour interval in the pre-selected period never falls to zero. Furthermore, “substantially continuous” drug delivery can also encompass delivery of drug at a substantially constant, pre-selected rate or range of rates (e.g., amount of drug per unit time, or volume of drug formulation for a unit time) that is substantially uninterrupted for a pre-selected period of drug delivery.

[0115] As used herein, the term “pirfenidone” refers to 5-methyl-1-phenyl-2-(1H)-pyridone. As used herein, the term “pirfenidone analog” refers to any compound of Formula I, IIA, or IIB, below. A “specific pirfenidone analog,” and all grammatical variants thereof, refers to, and is limited to, each and every pirfenidone analog shown in Table 10.

[0116] The term “anti-fibrotic” agent, drug or compound is meant to encompass agents that prevent or reduce fibrosis, including: Type II interferon receptor agonists (e.g. interferon-gamma); pirfenidone and pirfenidone analogs; anti-angiogenic agents, such as VEGF antagonists, VEGF receptor antagonists, bFGF antagonists, bFGF receptor antagonists, TGF-beta antagonists, and TGF-beta receptor antagonists; and anti-inflammatory agents, including tumor necrosis factor (TNF) antagonists, such as anti-TNF antibodies (e.g. REMICADE™ anti-TNF monoclonal antibody) and soluble TNF receptor (e.g. ENBREL™ TNF receptor-Ig immunoadhesin), and IL-1 antagonists, such as IL-1Ra.

[0117] The terms “angiogenic agent,” “angiogenic compound,” and “angiogenic factor” are meant to include agents that promote neovascularization, such as VEGF, bFGF, and TGF-beta.

[0118] The terms “anti-angiogenic” or “angiostatic” agent, drug or compound, or “angiogenesis inhibitor,” are meant to include agents that prevent or reduce neovascularization, such as VEGF antagonists, VEGF receptor antagonists, bFGF antagonists, bFGF receptor antagonists, TGF-beta antagonists, and TGF-beta receptor antagonists.

[0119] As used herein, the term “nucleoside” refers to a compound composed of any pentose or modified pentose moiety attached to a specific position of a heterocycle or to the natural position of a purine (9-position) or pyrimidine (1-position) or to the equivalent position in an analog.

[0120] As used herein, the term “nucleotide” refers to a phosphate ester substituted on the 5′-position of a nucleoside.

[0121] As used herein, the term “heterocycle” refers to a monovalent saturated or unsaturated carbocyclic radical having at least one hetero atom, such as N, O, S, Se or P, within the ring, each available position of which can be optionally substituted, independently, with, e.g., hydroxyl, oxo, amino, imino, lower alkyl, bromo, chloro and/or cyano. Included within the term “heterocycle” are purines and pyrimidines.

[0122] As used herein, the term “purine” refers to nitrogenous bicyclic heterocycles.

[0123] As used herein, the term “pyrimidine” refers to nitrogenous monocyclic heterocycles.

[0124] As used herein, the term “L-nucleoside” refers to a nucleoside compound that has an L-ribose sugar moiety.

[0125] The term “antineoplastic” agent, drug or compound is meant to refer to any agent, including any chemotherapeutic agent, biological response modifier (including without limitation (i) proteinaceous, i.e. peptidic, molecules capable of elaborating or altering biological responses and (ii) non-proteinaceous, i.e. non-peptidic, molecules capable of elaborating or altering biological responses), cytotoxic agent, or cytostatic agent, that reduces proliferation of a neoplastic cell.

[0126] The term “anti-fibrotic” agent, drug or compound is meant to encompass agents that prevent or reduce fibrosis, including: Type II interferon receptor agonists (e.g. interferon-gamma); pirfenidone and pirfenidone analogs; anti-angiogenic agents, such as VEGF antagonists, VEGF receptor antagonists, bFGF antagonists, bFGF receptor antagonists, TGF-beta antagonists, and TGF-beta receptor antagonists; and anti-inflammatory agents, including tumor necrosis factor (TNF) antagonists, such as anti-TNF antibodies (e.g. REMICADE™ anti-TNF monoclonal antibody) and soluble TNF receptor (e.g. ENBREL™ TNF receptor-Ig immunoadhesin), and IL-1 antagonists, such as IL-1Ra.

[0127] The term “chemotherapeutic agent” or “chemotherapeutic” (or “chemotherapy”, in the case of treatment with a chemotherapeutic agent) is meant to encompass any non-proteinaceous (i.e., non-peptidic) chemical compound useful in the treatment of cancer. Examples of chemotherapeutic agents include alkylating agents such as thiotepa and cyclophosphamide (CYTOXAN™); alkyl sulfonates such as busulfan, improsulfan and piposulfan; aziridines such as berizodopa, carboquone, meturedopa, and uredopa; ethylenimines and methylamelamines including altretamine, triethylenemelamine, triethylenephosphoramide, triethylenethiophosphoramide and trimethylolomelamine; acetogenins (especially bullatacin and bullatacinone); a camptothecin (including synthetic analogue topotecan); bryostatin; callystatin; CC-1065 (including its adozelesin, carzelesin and bizelesin synthetic analogues); cryptophycins (particularly cryptophycin 1 and cryptophycin 8); dolastatin; duocarmycin (including the synthetic analogues, KW-2189 and CBI-TMI); eleutherobin; pancratistatin; a sarcodictyin; spongistatin; nitrogen mustards such as chlorambucil, chlomaphazine, cholophosphamide, estramustine, ifosfamide, mechlorethamine, mechlorethamine oxide hydrochloride, melphalan, novembichin, phenesterine, prednimustine, trofosfamide, uracil mustard; nitrosoureas such as carmustine, chlorozotocin, foremustine, lomustine, nimustine, ranimustine; antibiotics such as the enediyne antibiotics (e.g. calicheamicin, especially calicheamicin gamma1I and calicheamicin phill, see, e.g., Agnew, Chem. Intl. Ed. Engl., 33: 183-186 (11024); dynemicin, including dynemicin A; bisphosphonates, such as clodronate; an esperamicin; as well as neocarzinostatin chromophore and related chromoprotein enediyne antibiotic chromomophores), aclacinomysins, actinomycin, authramycin, azaserine, bleomycins, cactinomycin, carabicin, carminomycin, carzinophilin, chromomycins, dactinomycin, daunorubicin, detorubicin, 6-diazo-5-oxo-L-norleucine, doxorubincin (Adramycin™) (including morpholino-doxorubicin, cyanomorpholino-doxorubicin, 2-pyrrolino-doxorubicin and deoxydoxorubicin), epirubicin, esorubicin, idarubicin, marcellomycin, mitomycins such as mitomycin C, mycophenolic acid, nogalamycin, olivomycins, peplomycin, potfiromycin, puromycin, quelamycin, rodorubicin, streptonigrin, streptozocin, tubercidin, ubenimex, zinostatin, zorubicin; anti-metabolites such as methotrexate and 5-fluorouracil (5-FU); folic acid analogues such as demopterin, methotrexate, pteropterin, trimetrexate; purine analogs such as fludarabine, 6-mercaptopurine, thiamiprine, thioguanine; pyrimidine analogues such as ancitabine, azacitidine, 6-azauridine, carmofur, cytarabine, dideoxyuridine, doxifluridine, enocitabine, floxuridine; androgens such as calusterone, dromostanolone propionate, epitiostanol, mepitiostane, testolactone; anti-adrenals such as aminoglutethimide, mitotane, trilostane; folic acid replenisher such as frolinic acid; aceglatone; aldophosphamide glycoside; aminolevulinic acid; eniluracil; amsacrine; bestrabucil; bisantrene; edatraxate; defofamine; demecolcine; diaziquone; elfomithine; elliptinium acetate; an epothilone; etoglucid; gallium nitrate; hydroxyurea; lentinan; lonidamine; maytansinoids such as maytansine and ansamitocins; mitoguazone; mitoxantrone; mopidamol; nitracrine; pentostatin; phenamet; pirarubicin; losoxantrone; podophyllinic acid; 2-ethylhydrazide; procarbazine; PSK®; razoxane; rhizoxin; sizofiran; spirogermanium; tenuazonic acid; triaziquone; 2,2′,2″-trichlorotriethylamine; trichothecenes (especially T-2 toxin, verracurin A, roridin A and anguidine); urethane; vindesine; dacarbazine; mannomustine; mitobronitol; mitolactol; pipobroman; gacytosine; arabinoside (“Ara-C”); cyclophosphamide; thiopeta; taxoids, e.g. paclitaxel (TAXOL®, Bristol Meyers Squibb Oncology, Princeton, N.J.) and docetaxel (TAXOTERE®, Rhone-Poulenc Rorer, Antony, France); chlorambucil; gemcitabine (Gemzar™); 6-thioguanine; mercaptopurine; methotrexate; platinum analogs such as cisplatin and carboplatin; vinblastine; platinum; etoposide (VP-16); ifosfamide; mitroxantrone; vancristine; vinorelbine (Navelbine™); novantrone; teniposide; edatrexate; daunomycin; aminopterin; xeoloda; ibandronate; CPT-11; topoisomerase inhibitor RFS 2000; difluromethylomithine (DMFO); retinoids such as retinoic acid; capecitabine; and pharmaceutically acceptable salts, acids or derivatives of any of the above. Also included in the definition of “chemotherapeutic agent” are anti-hormonal agents that act to regulate or inhibit hormone action on tumors such as anti-estrogens and selective estrogen receptor modulators (SERMs), including, for example, tamoxifen (including Nolvadex™), raloxifene, droloxifene, 4-hydroxytamoxifen, trioxifene, keoxifene, LY117018, onapristone, and toremifene (Fareston™); inhibitors of the enzyme aromatase, which regulates estrogen production in the adrenal glands, such as, for example, 4(5)-imidazoles, aminoglutethimide, megestrol acetate (Megace™), exemestane, formestane, fadrozole, vorozole (Rivisor™), letrozole (Femara™), and anastrozole (Arimidex™); and anti-androgens such as flutamide, nilutamide, bicalutamide, leuprolide, and goserelin; and pharmaceutically acceptable salts, acids or derivatives of any of the above.

[0128] The term “antineoplastic” agent, drug or compound is meant to refer to any agent, including any chemotherapeutic agent, biological response modifier (including without limitation (i) proteinaceous, i.e. peptidic, molecules capable of elaborating or altering biological responses and (ii) non-proteinaceous, i.e. non-peptidic, molecules capable of elaborating or altering biological responses), cytotoxic agent, or cytostatic agent, that reduces proliferation of a neoplastic cell.

[0129] The term “biological response modifier” refers to any proteinaceous (i.e., peptidic) molecule or any non-proteinaceous (i.e., non-peptidic) molecule capable of elaborating or altering a biological response relevant to the treatment of cancer. Examples of biological response modifiers include antagonists of tumor-associated antigens, such as anti-tumor antigen antibodies, antagonists of cellular receptors capable of inducing cell proliferation, agonists of cellular receptors capable of inducing apoptosis, such as Apo-2 ligands, Type I interferon receptor agonists, such as interferon-α molecules and interferon-β molecules, Type II interferon receptor agonists, such as interferon-γ molecules, Type III interferon receptor agonists, such as IL-28A, IL-28B, and IL-29, antagonists of inflammatory cytokines, including tumor necrosis factor (TNF) antagonists, such as anti-TNF antibodies (e.g. REMICADE™ anti-TNF monoclonal antibody) and soluble TNF receptor (e.g. ENBREL™ TNF receptor-Ig immunoadhesin), growth factor cytokines, such as hematopoietic cytokines, including erythropoietins, such as EPOGEN™ epoetin-alfa, granulocyte colony stimulating factors (G-CSFs), such as NEUPOGEN™ filgrastim, granulocyte-macrophage colony stimulating factors (GM-CSFs), and thrombopoietins, lymphocyte growth factor cytokines, such as interleukin-2, and antagonists of growth factor cytokines, including antagonists of angiogenic factors, e.g. vascular endothelial cell growth factor (VEGF) antagonists, such as AVASTIN™ bevacizumab (anti-VEGF monoclonal antibody).

[0130] As used herein, the term “HCV enzyme inhibitor” refers to any agent that inhibits an enzymatic activity of an enzyme encoded by HCV. The term “HCV enzyme inhibitor” includes, but is not limited to, agents that inhibit HCV NS3 protease activity; agents that inhibit HCV NS3 helicase activity; and agents that inhibit HCV NS5B RNA-dependent RNA polymerase activity.

[0131] As used herein, the terms “HCV NS3 protease inhibitor” and “NS3 protease inhibitor” refer to any agent that inhibits the protease activity of HCV NS3/NS4A complex. Unless otherwise specifically stated, the term “NS3 inhibitor” is used interchangeably with the terms “HCV NS3 protease inhibitor” and “NS3 protease inhibitor.”

[0132] As used herein, the terms “HCV NS5B inhibitor,” “NS5B inhibitor,” “HCV NS5B RNA-dependent RNA polymerase inhibitor,” “HCV RDRP inhibitor,” and “RDRP inhibitor,” refer to any agent that inhibits HCV NS5B RNA-dependent RNA polymerase activity.

[0133] Before the present invention is further described, it is to be understood that this invention is not limited to particular embodiments described, as such may, of course, vary. It is also to be understood that the terminology used herein is for the purpose of describing particular embodiments only, and is not intended to be limiting, since the scope of the present invention will be limited only by the appended claims.

[0134] Where a range of values is provided, it is understood that each intervening value, to the tenth of the unit of the lower limit unless the context clearly dictates otherwise, between the upper and lower limit of that range and any other stated or intervening value in that stated range, is encompassed within the invention. The upper and lower limits of these smaller ranges may independently be included in the smaller ranges, and are also encompassed within the invention, subject to any specifically excluded limit in the stated range. Where the stated range includes one or both of the limits, ranges excluding either or both of those included limits are also included in the invention.

[0135] Unless defined otherwise, all technical and scientific terms used herein have the same meaning as commonly understood by one of ordinary skill in the art to which this invention belongs. Although any methods and materials similar or equivalent to those described herein can also be used in the practice or testing of the present invention, the preferred methods and materials are now described. All publications mentioned herein are incorporated herein by reference to disclose and describe the methods or materials in connection with which the publications are cited.

[0136] It must be noted that as used herein and in the appended claims, the singular forms “a”, “and”, and “the” include plural referents unless the context clearly dictates otherwise. Thus, for example, reference to “a protease-resistant or protease-resistant, hyperglycosylated polypeptide variant” includes a plurality of such polypeptide variants and reference to “the oral formulation” includes reference to one or more oral formulations and equivalents thereof known to those skilled in the art, and so forth.

[0137] The publications discussed herein are provided solely for their disclosure prior to the filing date of the present application. Nothing herein is to be construed as an admission that the present invention is not entitled to antedate such publication by virtue of prior invention. Further, the dates of publication provided may be different from the actual publication dates which may need to be independently confirmed.

### DETAILED DESCRIPTION OF THE INVENTION

[0138] The present invention provides oral pharmaceutical compositions comprising a hyperglycosylated or protease-resistant, hyperglycosylated polypeptide variant of a parent protein therapeutic. The hyperglycosylated or protease-resistant, hyperglycosylated polypeptide variant contains (1) a carbohydrate moiety covalently linked to at least one non-native glycosylation site not found in the parent protein therapeutic or (2) a carbohydrate moiety covalently linked to at least one native glycosylation site found but not glycosylated in the parent protein therapeutic. In addition, the known protease-resistant, hyperglycosylated polypeptide variant comprises at least one mutated protease cleavage site in place of a native protease cleavage site found in the parent protein therapeutic, and thus exhibits increased protease resistance compared to the parent protein therapeutic.

[0139] The present invention further provides therapeutic methods for treating a disease in a patient involving orally administering to the patient a known hyperglycosylated or protease-resistant, hyperglycosylated polypeptide variant in an oral dosage form and at a dosing interval that delivers more drug (on a mole basis) per dose and at least as many doses per unit of time as that received by the patient in a method proven to be effective for treating the disease by subcutaneous bolus injection of the parent polypeptide in a parenteral dosage form.

[0140] The present invention further provides synthetic Type I interferon receptor polypeptide agonists that contain one or more glycosylation sites; and compositions, including pharmaceutical compositions, comprising the agonists. The present invention further provides nucleic acids comprising nucleotide sequences encoding subject polypeptide agonists; and host cells comprising subject nucleic acids. The present invention further provides containers and kits comprising a subject polypeptide agonist.

[0141] A subject synthetic Type I interferon receptor polypeptide agonist comprises a hybrid or consensus Type I interferon receptor polypeptide agonist comprising at least one glycosylation site. The glycosylation site(s) provides a site for attachment of a carbohydrate moiety on the subject synthetic polypeptide agonist, such that when the subject synthetic polypeptide agonist is produced in a eukaryotic cell capable of glycosylation, the subject synthetic polypeptide agonist is glycosylated. The glycosylation confers one or more advantages on the subject synthetic polypeptide agonist, relative to a parent Type I interferon receptor polypeptide agonist, or compared to a naturally-occurring Type I interferon receptor polypeptide agonist. Such advantages include increased serum half-life; reduced immunogenicity; increased functional in vivo half-life; reduced degradation by gastrointestinal tract conditions; and increased rate of absorption by gut epithelial cells. An increased rate of absorption by gut epithelial cells and reduced degradation by gastrointestinal tract conditions is important for enteral (e.g., oral) formulations of a subject synthetic Type I interferon receptor polypeptide agonist.

[0142] Subject synthetic Type I interferon receptor polypeptide agonists are useful for treating various disorders, including viral infections, fibrotic disorders, and proliferative disorders. Accordingly, the present invention further provides methods of treating viral infections, methods of treating fibrotic disorders, and methods of treating proliferative disorders, the methods generally involving administering to an individual in need thereof an effective amount of a subject synthetic polypeptide agonist. In some embodiments, a subject treatment method further involves administration of at least one additional therapeutic agent to treat the viral infection, fibrotic disorder, or proliferative disorder. In some embodiments, a subject treatment method further involves administering at least one side effect management agent to reduce side effects induced by one or more of the therapeutic agents.

[0143] In another aspect, the synthetic Type I interferon receptor polypeptide agonists of the invention find utility as reagents for detection and isolation of Type I interferon receptor, such as detection of Type I interferon receptor expression in various cell types and tissues, including the determination of Type I interferon receptor density and distribution in cell populations, and cell sorting based on Type I interferon receptor expression. In yet another aspect, the subject synthetic Type I interferon receptor agonists are useful for the development of agents with Type I interferon receptor binding or activation patterns similar to those of the subject synthetic Type I interferon receptor agonists. The synthetic Type I interferon receptor agonists of the invention can be used in Type I interferon receptor signal transduction assays to screen for small molecule agonists or antagonists of Type I interferon receptor signaling.

Polypeptide Variants

[0144] The present invention relates to hyperglycosylated or protease-resistant; hyperglycosylated polypeptide variants. The hyperglycosylated or protease-resistant, hyperglycosylated polypeptide variants comprise at least one mutated protease cleavage site in place of a native protease cleavage site found in the parent protein therapeutic, and thus exhibit increased protease resistance compared to the parent protein therapeutic.

[0145] A protease cleavage site that is found in a parent protein therapeutic, and that is mutated in a hyperglycosylated or protease-resistant, hyperglycosylated polypeptide variant, such that the site is no longer cleaved, or exhibits greater resistance to cleavage (i.e., is a worse substrate than the native site for proteolytic processing) by the protease that cleaves the protease cleavage site in the parent protein, is referred to herein as a “mutated protease cleavage site” or a “mutant cleavage site.” A protease cleavage site that is found in a parent protein therapeutic is referred to herein as a “native protease cleavage site.”

[0146] In addition, a hyperglycosylated or protease-resistant, hyperglycosylated polypeptide variant includes (1) a carbohydrate moiety covalently attached to at least one non-native glycosylation site not found in a parent protein therapeutic or (2) a carbohydrate moiety covalently attached to at least one native glycosylation site found but not glycosylated in a parent protein therapeutic. A glycosylation site that is not found in a parent protein therapeutic is referred to herein as a “non-native glycosylation site.” A glycosylation site that is found in but not glycosylated in a parent protein therapeutic is referred to herein as a “native glycosylation site.” Thus, a hyperglycosylated or protease-resistant, hyperglycosylated polypeptide variant includes (1) a carbohydrate moiety covalently linked to the at least one non-native glycosylation site and/or (2) a carbohydrate moiety covalently linked to the at least one native glycosylation site. A hyperglycosylated or protease-resistant, hyperglycosylated polypeptide variant that includes (1) a carbohydrate moiety covalently linked to a non-native glycosylation site or (2) a carbohydrate moiety covalently linked to a native glycosylation site, and that comprises at least one mutated protease cleavage site in place of a native protease cleavage site found in a parent protein therapeutic, is referred to herein as a “hyperglycosylated or protease-resistant, hyperglycosylated polypeptide variant.”

[0147] A “known” hyperglycosylated or protease-resistant, hyperglycosylated polypeptide variant means any hyperglycosylated or protease-resistant, hyperglycosylated polypeptide variant presently in existence or hereafter created that (1) retains a desired pharmacologic activity of a parent protein therapeutic and (2) exhibits a longer serum half-life or greater area under the curve of drug concentration in serum as a function of time (AUC) compared to that exhibited by the parent protein therapeutic when administered to a patient in a similar form and at a similar dose, dosing frequency and route of administration. The present invention provides compositions, including oral pharmaceutical compositions, comprising the known hyperglycosylated or protease-resistant, hyperglycosylated polypeptide variants.

[0148] A known hyperglycosylated, hyperglycosylated polypeptide variant is provided in a formulation suitable for oral delivery. The parent protein therapeutic is ordinarily administered in an immediate release formulation suitable for subcutaneous bolus injection. Typically, the oral dosage form of the known hyperglycosylated or protease-resistant, hyperglycosylated polypeptide variant contains a first number of moles; and the parent protein therapeutic is in a parenteral dosage form that contains a second number of moles. In general, the first number of moles is greater than the second number of moles. Nevertheless, a hyperglycosylated or protease-resistant, hyperglycosylated polypeptide variant in the oral dosage form is released over a period of time that is no longer than the dosing interval used in the administration of the parent protein therapeutic in a regimen proven to be effective for the treatment of a disease in a patient.

[0149] The parent protein therapeutic is typically in a parenteral dosage form administered by subcutaneous bolus injection, which provides a “depot” effect, slowly releasing the protein therapeutic into the bloodstream by diffusion of drug away from the tissues surrounding the injection site.

[0150] A subject method of the invention replaces the subcutaneous bolus injection “depot” effect with a comparable pharmacokinetic profile achieved by oral delivery of a longer-acting agent (a known hyperglycosylated, protease-resistant polypeptide variant with a greater serum half-life and/or AUC than its parent protein) free of an extended release or depot formulation. That is, the time required for release of the first number of moles of the known hyperglycosylated, protease-resistant polypeptide variant, when administered orally, is no greater than the period of time between doses of the parent protein therapeutic when administered by subcutaneous bolus injection in a method that is proven to be effective for treatment of the disease. Thus, in some embodiments, a known hyperglycosylated, protease-resistant polypeptide variant is administered at least as frequently, or in many cases more frequently, and at higher dosage (on a mole basis) than the parent protein therapeutic.

Structural Features

[0151] A hyperglycosylated or protease-resistant, hyperglycosylated polypeptide variant has an amino acid sequence that comprises one or more mutated protease cleavage sites in place of a native protease cleavage site(s) found in a corresponding parent protein therapeutic; and has an amino acid sequence that comprises (1) one or more non-native glycosylation sites and/or (2) one or more native glycosylation sites. Thus, e.g., a desired polypeptide variant has an amino acid sequence that comprises one or more mutated protease cleavage sites in place of a native protease cleavage site(s) found in a parent protein therapeutic; and has an amino acid sequence that comprises one or more glycosylation sites not found in the parent protein therapeutic or found but not glycosylated in the parent protein therapeutic. A parent protein therapeutic is in some embodiments a corresponding naturally-occurring polypeptide. In other embodiments, a parent protein therapeutic is a non-naturally occurring polypeptide (e.g., a synthetic polypeptide, a hybrid polypeptide, a consensus polypeptide, a fusion polypeptide, a recombinant polypeptide, or other variant of a naturally-occurring polypeptide). As used herein, the terms “polypeptide variant” and “variant polypeptide” both refer to any polypeptide that comprises one or more mutated protease cleavage sites in place of a native protease cleavage sites(s) found in a parent protein therapeutic; and that comprises (1) one or more glycosylation sites not found in the parent protein therapeutic or (2) one or more glycosylation sites found but not glycosylated in the parent protein therapeutic.

[0152] Non-native and native glycosylation sites include N-linked glycosylation sites, and O-linked glycosylation sites. N-linked glycosylation sites include, e.g., Asn-X-Ser/Thr, where the asparagine residue provides a site for N-linked glycosylation, and where X is any amino acid. O-linked glycosylation sites include at least one serine or threonine residue. A number of O-linked glycosylation sites are known in the art and have been reported in the literature. See, e.g., Ten Hagen et al. (11029) J. Biol. Chem. 274(39):27867-74; Hanisch et al. (2001) Glycobiology 11:731-740; and Ten Hagen et al. (2003) Glycobiology 13:1R-16R.

[0153] In all embodiments, a polypeptide variant is hyperglycosylated, e.g., a polypeptide variant comprises (1) a carbohydrate moiety covalently linked to a non-native glycosylation site and/or (2) a carbohydrate moiety covalently linked to a native glycoyslation site. In many embodiments, a known hyperglycosylated or protease-resistant, hyperglycosylated polypeptide variant comprises a carbohydrate moiety covalently linked to a native glycosylation site; and a carbohydrate moiety covalently linked to a non-native glycosylation site. In some embodiments, a known hyperglycosylated or protease-resistant, hyperglycosylated polypeptide variant comprises O-linked glycosylation. In other embodiments, a known hyperglycosylated or protease-resistant, hyperglycosylated polypeptide variant comprises N-linked glycosylation. In other embodiments, a known hyperglycosylated or protease-resistant, hyperglycosylated polypeptide variant comprises both O-linked and N-linked glycosylation.

[0154] In some embodiments, a known hyperglycosylated or protease-resistant, hyperglycosylated polypeptide variant comprises one, two, three, four, or five carbohydrate moieties, each linked to different glycosylation sites. In some embodiments, a known hyperglycosylated or protease-resistant, hyperglycosylated polypeptide variant is glycosylated at a non-native glycosylation site. In some of these embodiments, a known hyperglycosylated or protease-resistant, hyperglycosylated polypeptide variant is glycosylated at a single non-native glycosylation site. In other embodiments, a known hyperglycosylated or protease-resistant, hyperglycosylated polypeptide variant is glycosylated at more than one non-native glycosylation site, e.g., the known hyperglycosylated or protease-resistant, hyperglycosylated polypeptide variant is glycosylated at two, three, or four non-native glycosylation sites.

[0155] In other embodiments, a known hyperglycosylated or protease-resistant, hyperglycosylated polypeptide variant is glycosylated at a native glycosylation site. In some of these embodiments, a known hyperglycosylated or protease-resistant, hyperglycosylated polypeptide variant is glycosylated at a single native glycosylation site. In other embodiments, a known hyperglycosylated or protease-resistant, hyperglycosylated polypeptide variant is glycosylated at more than one native glycosylation site, e.g., the known hyperglycosylated or protease-resistant, hyperglycosylated polypeptide variant is glycosylated at two, three, or four native glycosylation sites.

[0156] In other embodiments, a known hyperglycosylated or protease-resistant, hyperglycosylated polypeptide variant is glycosylated at both a native glycosylation site(s) and a non-native glycosylation site(s).

[0157] A known hyperglycosylated or protease-resistant, hyperglycosylated polypeptide variant can comprise at least one additional carbohydrate moiety not found in a parent protein therapeutic when each is synthesized in a eukaryotic cell that is capable of N- and/or O-linked protein glycosylation. Thus, e.g., compared to a parent protein therapeutic, a known hyperglycosylated or protease-resistant, hyperglycosylated polypeptide variant can comprise at least one, at least two, at least three, or at least four, or more, additional carbohydrate moieties. For example, where a parent protein therapeutic has one covalently linked carbohydrate moiety, a known hyperglycosylated or protease-resistant, hyperglycosylated polypeptide variant can have two, three, four, or more, covalently linked carbohydrate moieties. In some embodiments, the known hyperglycosylated or protease-resistant, hyperglycosylated polypeptide variant lacks a carbohydrate moiety covalently linked to a non-native glycosylation site; and has instead at least one, at least two, at least three, or at least four, or more, additional carbohydrate moieties attached to native glycosylation sites. In other embodiments, the known hyperglycosylated or protease-resistant, hyperglycosylated polypeptide variant lacks a carbohydrate moiety covalently linked to a native glycosylation site; and has instead at least two, at least three, or at least four, or more, carbohydrate moieties attached to non-native glycosylation sites.

Glycosylated Type I Interferons

[0158] A subject synthetic Type I interferon receptor polypeptide agonist can have a consensus or hybrid Type I interferon receptor polypeptide agonist amino acid sequence that comprises one or more non-native glycosylation sites. Thus, e.g., a subject synthetic Type I interferon receptor polypeptide agonist can have an amino acid sequence that comprises one or more glycosylation sites not found in a naturally-occurring Type I interferon receptor polypeptide agonist, e.g., not found in any known naturally occurring IFN-α, IFN-β, IFN-κ, IFN-τ, or IFN-ω. As used herein, the term “non-native glycosylation site” is defined as a glycosylation site located at a position in a synthetic Type I interferon receptor polypeptide agonist amino acid sequence, for which glycosylation site/position there is no homologous glycosylation site/position that exists in a naturally-occurring Type I interferon receptor polypeptide agonist amino acid sequence.

[0159] Alternatively, a subject synthetic Type I interferon receptor polypeptide agonist can have a consensus or hybrid Type I interferon receptor polypeptide agonist amino acid sequence that comprises one or more naturally-occurring or native glycosylation sites. As used herein, the term “native glycosylation site” is defined as a glycosylation site located at a position in a synthetic Type I interferon receptor polypeptide agonist amino acid sequence, for which glycosylation site/position there is a homologous glycosylation site/position that exists in at least one naturally-occurring Type I interferon receptor polypeptide agonist amino acid sequence.

[0160] As used herein, the term “synthetic Type I interferon receptor polypeptide agonist” is defined as any consensus or hybrid Type I interferon polypeptide agonist that comprises one or more glycosylation sites. Thus, a “synthetic Type I interferon receptor polypeptide agonist” encompasses any hybrid or consensus Type I interferon receptor polypeptide agonist that comprises one or more glycosylation sites, including any hybrid or consensus Type I interferon receptor polypeptide agonist that comprises one or more native glycosylation sites and/or one or more non-native glycosylation sites.

[0161] A “parent Type I interferon receptor polypeptide agonist” is a Type I interferon receptor polypeptide agonist that serves as a reference point for comparison. In some embodiments, a subject synthetic Type I interferon receptor polypeptide agonist comprises at least one additional glycosylation site not found in a parent Type I interferon receptor polypeptide agonist. For example, in some embodiments, a parent Type I interferon receptor polypeptide agonist is Infergen® consensus IFN-α (InterMune, Inc., Brisbane, Calif.). As shown in FIG. 25, a subject synthetic Type I interferon receptor polypeptide agonist comprises one or more glycosylation sites not found in the parent Infergen® consensus IFN-α.

[0162] A subject synthetic Type I interferon receptor polypeptide agonist has a length of from about 150 amino acids to about 200 amino acids, e.g., from about 150 amino acids to about 155 amino acids, from about 155 amino acids to about 160 amino acids, from about 160 amino acids to about 165 amino acids, from about 165 amino acids to about 170 amino acids, from about 170 amino acids to about 175 amino acids, from about 175 amino acids to about 180 amino acids, from about 180 amino acids to about 185 amino acids, from about 185 amino acids to about 190 amino acids, from about 190 amino acids to about 195 amino acids, or from about 195 amino acids to about 200 amino acids.

[0163] In some embodiments, the amino acid sequence of a naturally-occurring Type I interferon receptor polypeptide agonist is modified to include at least one non-native glycosylation site. As one non-limiting example, where a naturally occurring Type I interferon receptor polypeptide agonist comprises the amino acid sequence KDSS, the KDSS sequence is modified to KNSS. As another non-limiting example, where a naturally occurring Type I interferon receptor polypeptide agonist comprises the amino acid sequence WDET, the WDET sequence is modified to WNET. As another non-limiting example, where a naturally occurring Type I interferon receptor polypeptide agonist comprises the amino acid sequence VEET, the VEET sequence is modified to VTET. As another non-limiting example, where a naturally occurring Type I interferon receptor polypeptide agonist comprises the amino acid sequence VEET, the VEET sequence is modified to VNET.

[0164] In many embodiments, a subject synthetic Type I interferon receptor polypeptide agonist is glycosylated. In some embodiments, a subject synthetic Type I interferon receptor polypeptide agonist comprises O-linked glycosylation. In other embodiments, a subject synthetic Type I interferon receptor polypeptide agonist comprises N-linked glycosylation. In other embodiments, a subject synthetic Type I interferon receptor polypeptide agonist comprises both O-linked and N-linked glycosylation.

[0165] In some embodiments, a subject synthetic Type I interferon receptor polypeptide agonist is glycosylated at a non-native glycosylation site. In some of these embodiments, a subject synthetic Type I interferon receptor polypeptide agonist is glycosylated at a single non-native glycosylation site. In other embodiments, a subject synthetic Type I interferon receptor polypeptide agonist is glycosylated at more than one non-native glycosylation site, e.g., the subject synthetic Type I interferon receptor polypeptide agonist is glycosylated at two, three, or four non-native glycosylation sites.

[0166] In other embodiments, a subject synthetic Type I interferon receptor polypeptide agonist is glycosylated at a native glycosylation site. In some of these embodiments, a subject synthetic Type I interferon receptor polypeptide agonist is glycosylated at a single native glycosylation site. In other embodiments, a subject synthetic Type I interferon receptor polypeptide agonist is glycosylated at more than one native glycosylation site, e.g., the subject synthetic Type I interferon receptor polypeptide agonist is glycosylated at two, three, or four native glycosylation sites.

[0167] In other embodiments, a subject synthetic Type I interferon receptor polypeptide agonist is glycosylated at both a native glycosylation site(s) and a non-native glycosylation site(s).

[0168] Whether a subject synthetic Type I interferon receptor polypeptide agonist comprises N-linked and/or O-linked glycosylation is readily determined using standard techniques. See, e.g., “Techniques in Glycobiology” R. Townsend and A. Hotchkiss, eds. (11027) Marcel Dekker; and “Glycoanalysis Protocols (Methods in Molecular Biology, Vol. 76)” E. Hounsell, ed. (11028) Humana Press. The change in electrophoretic mobility of a protein before and after treatment with chemical or enzymatic deglycosylation (e.g., using endoglycosidases and/or exoglycosidases) is routinely used to determine the glycosylation status of a protein. Enzymatic deglycosylation can be carried out using any of a variety of enzymes, including, but not limited to, peptide-N-4-(N-acetyl-β-D-glucosaminyl) asparagine amidase (PNGase F); endoglycosidase F1, endoglycosidase F2, endoglycosidase F3, α(2→3,6,8,9) neuraminidase, and the like. For example, sodium docecyl sulfate-polyacrylamide gel electrophoresis (SDS-PAGE) analysis of the protein, either pre-treated with PNGase F or untreated with PNGaseF, is conducted. A marked decrease in band width and change in migration position after treatment with PNGaseF is considered diagnostic of N-linked glycosylation. The carbohydrate content of a glycosylated protein can also be detected using lectin analysis of protein blots (e.g., proteins separated by SDS-PAGE and transferred to a support, such as a nylon membrane). Lectins, carbohydrate-binding proteins from various plant tissues, have both high affinity and narrow specificity for a wide range of defined sugar epitopes found on glycoprotein glycans. Cummings (11024) Methods in Enzymol. 230:66-86. Lectins can be detectably labeled (either directly or indirectly), allowing detection of binding of lectins to carbohydrates on glycosylated proteins. For example, when conjugated with biotin or digoxigenin, a lectin bound to a glycosylated protein can be easily identified on membrane blots through a reaction utilizing avidin or anti-digoxigenin antibodies conjugated with an enzyme such as alkaline phosphatase, β-galactosidase, luciferase, or horse radish peroxidase, to yield a detectable product. Screening with a panel of lectins with well-defined specificity provides considerable information about a glycoprotein's carbohydrate complement.

Consensus Type I Interferon Receptor Polypeptide Agonists with Non-Native Glycosylation Site(s)

[0169] In some embodiments, a subject synthetic Type I interferon receptor polypeptide agonist comprises a consensus amino acid sequence and at least one non-native glycosylation site. In other embodiments, a subject synthetic Type I interferon receptor polypeptide agonist comprises a consensus amino acid sequence and at least one native glycosylation site.

[0170] A consensus sequence is derived by aligning three or more amino acid sequences, and identifying amino acids that are shared by at least two of the sequences. In some embodiments, a synthetic Type I interferon receptor polypeptide agonist comprises a consensus sequence derived from determining a consensus sequence of naturally occurring human IFN-α2b, naturally-occurring human IFN-α14, and naturally-occurring human IFN-β1. In other embodiments, a synthetic Type I interferon receptor polypeptide agonist comprises a consensus sequence derived from determining a consensus sequence of naturally occurring human IFN-α2b, naturally-occurring human IFN-α14, and naturally-occurring human IFN-ω1. In other embodiments, a synthetic Type I interferon receptor polypeptide agonist comprises a consensus sequence derived from determining a consensus sequence of naturally occurring human IFN-α2b, naturally-occurring human IFN-β1, and naturally-occurring human IFN-ω1. In other embodiments, a synthetic Type I interferon receptor polypeptide agonist comprises a consensus sequence derived from determining a consensus sequence of naturally occurring human IFN-α14, naturally-occurring human IFN-β1, and naturally-occurring human IFN-ω1. In other embodiments, a synthetic Type I interferon receptor polypeptide agonist comprises a consensus sequence derived from determining a consensus sequence of naturally occurring human IFN-α2b, naturally-occurring human IFN-α14, naturally-occurring human IFN-β1, and naturally-occurring human IFN-ω1. In other embodiments, the comparison further comprises including in the comparison the amino acid sequence of Infergen® consensus IFN-α.

[0171] In some of these embodiments, the subject synthetic Type I interferon receptor polypeptide agonist is a consensus sequence containing one or more glycosylation sites originating from one or more of the parent Type I interferon receptor polypeptide agonist amino acid sequences used to derive the consensus sequence. In additional embodiments, the consensus sequence is further modified to incorporate at least one non-native glycosylation site.

[0172] In one embodiment, the subject synthetic Type I interferon receptor polypeptide agonist comprises an amino acid sequence corresponding to the majority sequence depicted in FIG. 24 (SEQ ID NO:1355), further modified to incorporate at least one non-native glycosylation site.

[0173] In another embodiment, the subject synthetic Type I interferon receptor polypeptide agonist comprises an amino acid sequence corresponding to the majority sequence depicted in FIG. 24 (SEQ ID NO:1355), further modified to incorporate at least one glycosylation site from the group of the VTET glycosylation site of IFN-α2b, the KNSS glycosylation site of IFN-α14, the WNET glycosylation site of IFN-β1, and the WNMT glycosylation site of IFN-ω1. In other embodiments, the majority sequence is additionally modified to incorporate one or more non-native glycosylation sites.

[0174] In other embodiments, a subject synthetic Type I interferon receptor polypeptide agonist is obtained from a consensus sequence that does not have a glycosylation site originating from a parent Type I interferon receptor polypeptide agonist. In these embodiments, the consensus sequence is then further modified to include at least one non-native glycosylation site in order to obtain the subject synthetic Type I interferon receptor polypeptide agonist. For example, in some embodiments, where the consensus sequence includes KDSS, the KDSS sequence is modified to KNSS or KNST. As another non-limiting example, where the consensus sequence includes WDET, the WDET sequence is modified to WNET or WNES. As another non-limiting example, where the consensus sequence includes VEET, the VEET sequence is modified to VTET, VNES or VNET.

[0175] In particular embodiments, a subject synthetic Type I interferon receptor polypeptide agonist comprises the amino acid sequence identified as “majority” in FIG. 24, and further comprises one or more of the following modifications: KDSS modified to KNST; WDET modified to WNES; VEET modified to VNES or VNET.

[0176] In some particular embodiments, a subject synthetic Type I interferon receptor polypeptide agonist comprises an amino acid sequence as set forth in any one of SEQ ID NOs:1363-1373, as set forth in FIG. 25.

[0177] In one embodiment, a subject synthetic Type I interferon receptor polypeptide agonist comprises an amino acid sequence corresponding to the majority sequence depicted in FIG. 28 (SEQ ID NO:1390), further modified to incorporate at least one non-native glycosylation site. In some embodiments, a subject Type I interferon receptor polypeptide agonist comprises an amino acid sequence as set forth in any one of SEQ ID NOs:1392-1396, as set forth in FIG. 28.

[0178] In one embodiment, a subject synthetic Type I interferon receptor polypeptide agonist comprises an amino acid sequence corresponding to the majority sequence depicted in FIG. 29 (SEQ ID NO:1397), further modified to incorporate at least one non-native glycosylation site. In some embodiments, a subject Type I interferon receptor polypeptide agonist comprises an amino acid sequence as set forth in any one of SEQ ID NOs:1399-1403, as set forth in FIG. 29.

Hybrid Type I Interferon Receptor Polypeptide Agonists with Non-Native Glycosylation Site(s)

[0179] In some embodiments, a subject synthetic Type I interferon receptor polypeptide agonist comprises a hybrid Type I interferon receptor polypeptide agonist with one or more glycosylation sites. In other embodiments, a subject synthetic Type I interferon receptor polypeptide agonist comprises a hybrid type I interferon receptor polypeptide agonist with one or more glycosylation sites not found in any naturally occurring Type I interferon receptor polypeptide agonist. As used herein, a “hybrid Type I interferon receptor polypeptide agonist” is a polypeptide having an amino acid sequence comprising discrete sub-sequences corresponding in amino acid identity and number to sub-sequences of different, naturally occurring Type I interferon receptor polypeptide agonists, wherein the amino acid sequence of the subject synthetic polypeptide agonist differs from that of any naturally-occurring Type I interferon receptor polypeptide agonist. In some embodiments, the discrete sub-sequences are selected from IFN-α2b, IFN-α14, IFN-β1, and IFN-ω, and the amino acid sequence of the polypeptide agonist differs from the amino acid sequence of naturally occurring Type I interferon receptor polypeptide agonists IFN-α2b, IFN-α14, IFN-β1, and IFN-ω.

[0180] In other embodiments, the discrete sub-sequences can be selected from IFN-α2b, IFN-α14, IFN-β1, Infergen® consensus IFN-α, and IFN-ω, and the amino acid sequence of the polypeptide agonist differs from each of the amino acid sequences of the Type I interferon receptor polypeptide agonists IFN-α2b, IFN-α14, IFN-β1, Infergen® consensus IFN-α, and IFN-ω, respectively.

[0181] In some of these embodiments, the subject synthetic Type I interferon receptor polypeptide agonist is a hybrid Type I interferon receptor polypeptide agonist amino acid sequence containing one or more glycosylation sites originating from one or more of the parental Type I interferon receptor polypeptide agonist amino acid sequences used to derive the hybrid sequence. In additional embodiments, the hybrid sequence is further modified to incorporate at least one additional non-native glycosylation site (in addition to any non-native glycosylation site(s) originating from a parental Type I interferon receptor polypeptide agonist amino acid sequence).

[0182] It will be appreciated that the synthetic Type I interferon receptor polypeptide agonists of the invention include hybrid Type I interferon polypeptide agonists formed by substituting one or more amino acid residues in a parental IFN-α amino acid sequence with the amino acid residue or residues that form a native glycosylation site at a homologous position in another parental IFN-α amino acid sequence.

[0183] In one non-limiting example, the subject synthetic Type I interferon receptor polypeptide agonist is a hybrid Type I interferon receptor polypeptide agonist having a hybrid sequence formed by substituting KNSS for the native KDSS residues in the sequence of interferon alfa-2a or in the sequence of interferon alfa-2b. These synthetic Type I receptor polypeptide agonists are referred to herein as IFN-α2a (D102N) and IFN-α2b (D102N), respectively, where the amino acid sequence is that shown in FIG. 24.

[0184] In another non-limiting example, the subject synthetic Type I interferon receptor polypeptide agonist is a hybrid Type I interferon receptor polypeptide agonist having a hybrid sequence formed by substituting WNET for the native WDET residues in the sequence of interferon alfa-2a or in the sequence of interferon alfa-2b. These synthetic Type I receptor polypeptide agonists are referred to herein as IFN-α2a (D108N) and IFN-α2b (D108N), respectively, where the amino acid sequence is that shown in FIG. 24.

[0185] In another non-limiting example, the subject synthetic Type I interferon receptor polypeptide agonist is a hybrid Type I interferon receptor polypeptide agonist having a hybrid sequence formed by substituting KNSS and WNET for the native KDSS and WDET residues, respectively, in the sequence of interferon alfa-2a or in the sequence of interferon alfa-2b. These synthetic Type I receptor polypeptide agonists are referred to herein as IFN-α2a (D102N, D108N) and IFN-α2b (D102N, D108N), respectively, where the amino acid sequence is that shown in FIG. 24.

[0186] In other embodiments, the subject synthetic Type I interferon receptor polypeptide agonist is obtained from a hybrid sequence that does not have any glycosylation site(s) originating from a parental Type I interferon receptor polypeptide agonist amino acid sequence. In these embodiments, the hybrid sequence is then further modified to include at least one non-native glycosylation site in order to obtain the subject synthetic Type I interferon receptor polypeptide agonist. For example, in some embodiments, where the hybrid sequence includes KDSS, the KDSS sequence is modified to KNSS. As another non-limiting example, where the hybrid sequence includes WDET, the WDET sequence is modified to WNET. As another non-limiting example, where the hybrid sequence includes VEET, the VEET sequence is modified to VTET or VNET.

[0187] In some embodiments, a subject synthetic Type I interferon receptor polypeptide agonist comprises, in order from N-terminus to C-terminus, from about 2 to about 90, e.g., from about 2 to about 5, from about 5 to about 7, from about 7 to about 10, from about 10 to about 15, from about 15 to about 20, from about 20 to about 25, from about 25 to about 30, from about 30 to about 35, from about 35 to about 40, from about 40 to about 45, from about 45 to about 50, from about 50 to about 55, from about 55 to about 60, from about 60 to about 65, from about 65 to about 70, from about 75 to about 80, from about 80 to about 85, or from about 85 to about 90 contiguous amino acids of a first Type I interferon receptor polypeptide agonist selected from naturally-occurring human IFN-α2b (SEQ ID NO:1357), naturally-occurring human IFN-α14 (SEQ ID NO:1358), naturally occurring human IFN-β1 (SEQ ID NO:1359), and naturally-occurring human IFN-ω1 (SEQ ID NO:1360); and from about 2 to about 90, e.g., from about 2 to about 5, from about 5 to about 7, from about 7 to about 10, from about 10 to about 15, from about 15 to about 20, from about 20 to about 25, from about 25 to about 30, from about 30 to about 35, from about 35 to about 40, from about 40 to about 45, from about 45 to about 50, from about 50 to about 55, from about 55 to about 60, from about 60 to about 65, from about 65 to about 70, from about 75 to about 80, from about 80 to about 85, or from about 85 to about 90 contiguous amino acids of a second Type I interferon receptor polypeptide agonist selected from naturally-occurring human IFN-α2b, human IFN-α14, human IFN-β1, and human IFN-ω1, where the first and second Type I interferon receptor polypeptide agonists are different.

[0188] In some embodiments, a subject hybrid synthetic Type I interferon receptor polypeptide agonist further comprises from about 2 to about 90, e.g., from about 2 to about 5, from about 5 to about 7, from about 7 to about 10, from about 10 to about 15, from about 15 to about 20, from about 20 to about 25, from about 25 to about 30, from about 30 to about 35, from about 35 to about 40, from about 40 to about 45, from about 45 to about 50, from about 50 to about 55, from about 55 to about 60, from about 60 to about 65, from about 65 to about 70, from about 75 to about 80, from about 80 to about 85, or from about 85 to about 90 contiguous amino acids of a third Type I interferon receptor polypeptide agonist selected from naturally-occurring human IFN-α2b, human IFN-α14, human IFN-β1, and human IFN-ω1, where the third Type I interferon receptor polypeptide agonist is different from the first and second Type I interferon receptor polypeptide agonists.

[0189] In still other embodiments, a subject hybrid synthetic Type I interferon receptor polypeptide agonist further comprises from about 2 to about 90, e.g., from about 2 to about 5, from about 5 to about 7, from about 7 to about 10, from about 10 to about 15, from about 15 to about 20, from about 20 to about 25, from about 25 to about 30, from about 30 to about 35, from about 35 to about 40, from about 40 to about 45, from about 45 to about 50, from about 50 to about 55, from about 55 to about 60, from about 60 to about 65, from about 65 to about 70, from about 75 to about 80, from about 80 to about 85, or from about 85 to about 90 contiguous amino acids of a fourth Type I interferon receptor polypeptide agonist selected from naturally-occurring human IFN-α2b, human IFN-α14, human IFN-β1, and human IFN-ω1, where the fourth Type I interferon receptor polypeptide agonist is different from the first, second, and third Type I interferon receptor polypeptide agonists.

[0190] In particular embodiments, any of the above-described embodiments of a subject hybrid synthetic Type I interferon receptor polypeptide agonist comprises from about 4 to about 90, e.g., from about 4 to about 7, from about 7 to about 10, from about 10 to about 15, from about 15 to about 20, from about 20 to about 25, from about 25 to about 30, from about 30 to about 35, from about 35 to about 40, from about 40 to about 45, from about 45 to about 50, from about 50 to about 55, from about 55 to about 60, from about 60 to about 65, from about 65 to about 70, from about 75 to about 80, from about 80 to about 85, or from about 85 to about 90 contiguous amino acids of a segment of a human IFN-α14 polypeptide that includes at least the amino acid sequence KNSS of naturally occurring human IFN-α14.

[0191] In particular embodiments, any of the above-described embodiments of a subject hybrid synthetic Type I interferon receptor polypeptide agonist comprises from about 4 to about 90, e.g., from about 4 to about 7, from about 7 to about 10, from about 10 to about 15, from about 15 to about 20, from about 20 to about 25, from about 25 to about 30, from about 30 to about 35, from about 35 to about 40, from about 40 to about 45, from about 45 to about 50, from about 50 to about 55, from about 55 to about 60, from about 60 to about 65, from about 65 to about 70, from about 75 to about 80, from about 80 to about 85, or from about 85 to about 90 contiguous amino acids of a segment of a human IFN-β1 polypeptide that includes at least the amino acid sequence WNET of naturally occurring human IFN-β1.

[0192] In particular embodiments, any of the above-described embodiments of a subject hybrid synthetic Type I interferon receptor polypeptide agonist comprises from about 4 to about 90, e.g., from about 4 to about 7, from about 7 to about 10, from about 10 to about 15, from about 15 to about 20, from about 20 to about 25, from about 25 to about 30, from about 30 to about 35, from about 35 to about 40, from about 40 to about 45, from about 45 to about 50, from about 50 to about 55, from about 55 to about 60, from about 60 to about 65, from about 65 to about 70, from about 75 to about 80, from about 80 to about 85, or from about 85 to about 90 contiguous amino acids of a segment of a human IFN-ω1 polypeptide that includes at least the amino acid sequence WNMT of naturally occurring human IFN-ω1.

[0193] In particular embodiments, any of the above-described embodiments of a subject hybrid synthetic Type I interferon receptor polypeptide agonist comprises from about 4 to about 90, e.g., from about 4 to about 7, from about 7 to about 10, from about 10 to about 15, from about 15 to about 20, from about 20 to about 25, from about 25 to about 30, from about 30 to about 35, from about 35 to about 40, from about 40 to about 45, from about 45 to about 50, from about 50 to about 55, from about 55 to about 60, from about 60 to about 65, from about 65 to about 70, from about 75 to about 80, from about 80 to about 85, or from about 85 to about 90 contiguous amino acids of a segment of a human IFN-α2b polypeptide that includes at least the amino acid sequence VTET of naturally occurring human IFN-α2b.

Hybrid Type I Interferon Receptor Polypeptide Agonists with Non-Native Glycosylation Site(s) Generated by DNA Shuffling Techniques

[0194] In some embodiments, DNA shuffling techniques such as described in U.S. Pat. No. 6,132,970 may be used to generate hybrid type 1 interferons with desired glycosylation sites. DNA shuffling involves collecting a group of related genes in a suitable vessel. The collected gene group is then treated to fragment the collected genes resulting in a pool of gene fragments. In one non-limiting example, fragmentation is accomplished by treating the collected gene group with one or more selected nucleases. The pool of gene fragments is then heated to dissociate individual fragments. The heat-treated pool of gene fragments is then allowed to cool in order to permit the dissociated gene fragments to recombine at the sites of homology thus creating novel recombinations. The novel recombinations are extended, and the recombination process is repeated to create a library of novel full length genes which have a combination of characteristics of the starting parental genes.

[0195] In some embodiments, the genes encoding human Type 1 interferons or variant hyperglycosylated type 1 interferons (including consensus interferon alphacon-1) or hybrids of either are a group of homologous genes that encode polypeptides of similar biological activity. In one non-limiting example, two or more human type 1 interferon genes can be subjected to DNA shuffling techniques to generate a library of novel recombinant polynucleotides expressing polypeptides with similar biological functions. These novel polynucleotide molecules can contain gene fragments originating from any of the two or more species of human Type I interferons (including consensus interferon alphacon-1) selected for DNA shuffling and thus when these novel polynucleotides are expressed the resulting polypeptides can contain amino acid sequences common to any of the two or more species of human Type I interferons (including consensus interferon alphacon-1) whose genes were subjected to DNA shuffling.

[0196] In some embodiments, two or more variant hyperglycosylated type 1 interferon genes can be subjected to DNA shuffling techniques to generate a library of novel recombinant polynucleotides expressing polypeptides with similar biological functions. These novel polynucleotide molecules can contain gene fragments originating from any of the two or more species of variant hyperglycosylated Type I interferons (including consensus interferon alphacon-1) selected for DNA shuffling and thus when these novel polynucleotides are expressed the resulting polypeptides can contain amino acid sequences common to any of the two or more species of variant hyperglycosylated Type I interferons (including consensus interferon alphacon-1) whose genes were subjected to DNA shuffling.

[0197] In some embodiments, one or more human type I interferon and one or more variant hyperglycosylated type 1 interferon genes can be subjected to DNA shuffling techniques to generate a library of novel recombinant polynucleotides expressing polypeptides with similar biological functions. These novel polynucleotide molecules can contain gene fragments originating from any of the one or more species of variant hyperglycosylated Type I interferons (including consensus interferon alphacon-1) selected for DNA shuffling and from any of the one or more species of human Type I interferons (including consensus interferon alphacon-1) selected for DNA shuffling and thus when these novel polynucleotides are expressed the resulting polypeptides can contain amino acid sequences common to any of the one or more species of variant hyperglycosylated Type I interferons (including consensus interferon alphacon-1) or from any of the one of more species of human Type I interferons (including consensus interferon alphacon-1) whose genes were subjected to DNA shuffling.

[0198] In some embodiments, these novel molecules can be aligned with the naturally glycosylated Type I interferons and the corresponding glycosylation sites can be generated as a consequence of the DNA shuffling technique or additional glycosylation sites can be introduced in the same way as such site introduction has been described in this patent for non-glycosylated Type I interferons. These novel molecules can contain any one or more glycosylation sites selected from the group consisting of position 31, position 102, position 108, and position 138.

[0199] In some embodiments, the the resulting hybrid gene obtained from gene shuffling can encode for a polypeptide with one or more specific mutations selected from the group consisting of D31N, L31S, D31N, K31N, D102N, S102N, T102N, R102N, I 102N, D108N, E108N, K108N, E138T, G138T, I138T, L138T, and P138T. In another non-limiting example, the resulting hybrid gene obtained from the combination of gene shuffling and the introduction of hyperglycosylation sites as described in this patent for non-glycosylated Type I interferons can encode for a polypeptide with one or more specific mutations selected from the group consisting of D31N, L31S, D31N, K31N, D102N, S102N, T102N, R102N, I102N, D108N, E108N, K108N, E138T, G138T, I138T, L138T, and P138T.

[0200] In some embodiments, the resulting polypeptide expressed by a hybrid gene obtained from gene shuffling can encode for a polypeptide with one or more specific mutations selected from the group consisting of D31N, L31S, D31N, K31N, D102N, S102N, T102N, R102N, I102N, D108N, E108N, K108N, E138T, G138T, I138T, L380T, and P150T. In another non-limiting example, the resulting polypeptide expressed by a hybrid gene obtained from the combination of gene shuffling and the introduction of hyperglycosylation sites as described in this patent for non-glycosylated Type I interferons can encode for a polypeptide with one or more specific mutations selected from the group consisting of D31N, L31S, D31N, K31N, D102N, S102N, T102N, R102N, I102N, D108N, E108N, K108N, E138T, G138T, I138T, L138T, and P138T.

Functional features

[0201] A subject synthetic polypeptide is a Type I interferon receptor polypeptide agonist, e.g., a subject synthetic Type I interferon receptor polypeptide agonist binds to and causes signal transduction via the Type I interferon receptor. Whether a subject synthetic Type I interferon receptor polypeptide agonist functions as a Type I interferon receptor agonist can be readily determined using any known assay. Such assays include, an in vitro cell-based assay to detect activation of interferon-responsive genes (e.g., using a reporter gene operably linked to a promoter containing one or more interferon responsive elements); and the like. Such assays also include KIRA assays for Type I interferon receptor activation activity as described in the “Diagnostic Uses” section below.

[0202] In some embodiments, a subject synthetic Type I interferon receptor polypeptide agonist exhibits one or more of the following activities: antiproliferative activity, anti-viral activity, and anti-fibrotic activity. Whether a subject synthetic Type I interferon receptor polypeptide agonist exhibits anti-viral activity can be readily determined using any known assay, including e.g., an in vitro cell-based inhibition of viral replication assay. See, e.g., Patick et al. (11029) Antimicrobial Agents and Chemotherapy 43:2444-2450. Whether a subject synthetic Type I interferon receptor polypeptide agonist exhibits anti-proliferative activity can be readily determined using any known assay, including, e.g., an in vitro cell-based inhibition of proliferation assay.

[0203] A subject synthetic Type I interferon receptor polypeptide agonist exhibits one or more of the following properties: increased serum half-life; reduced immunogenicity in vivo; increased functional in vivo half-life; increased stability; reduced degradation by gastrointestinal tract conditions; and improved water solubility.

[0204] In some embodiments, a subject synthetic Type I interferon receptor polypeptide agonist has an increased serum half-life compared to a naturally occurring Type I interferon receptor polypeptide agonist or compared to a parent Type I interferon receptor polypeptide agonist. The term “serum half-life” is used interchangeably herein with the terms “plasma half-life,” and “circulating half-life.” In some embodiments, a subject synthetic Type I interferon receptor polypeptide agonist has a serum half life that is at least about 10%, at least about 15%, at least about 20%, at least about 25%, at least about 30%, at least about 35%, at least about 40%, at least about 45%, at least about 50%, at least about 55%, at least about 60%, at least about 65%, at least about 70%, at least about 75%, at least about 80%, at least about 90%, at least about 100% (or two-fold), at least about 2.5-fold, at least about 3-fold, at least about 3.5-fold, at least about 4-fold, at least about 4.5-fold, or at least about 5-fold greater than the serum half life of a naturally-occurring Type I interferon receptor polypeptide agonist or parent Type I interferon receptor polypeptide agonist that lacks the non-native glycosylation site. In some embodiments, a subject synthetic Type I interferon receptor polypeptide agonist has a serum half life that is at least about 10%, at least about 15%, at least about 20%, at least about 25%, at least about 30%, at least about 35%, at least about 40%, at least about 45%, at least about 50%, at least about 55%, at least about 60%, at least about 65%, at least about 70%, at least about 75%, at least about 80%, at least about 90%, at least about 100% (or two-fold), at least about 2.5-fold, at least about 3-fold, at least about 3.5-fold, at least about 4-fold, at least about 4.5-fold, or at least about 5-fold greater than the serum half life of a naturally-occurring Type I interferon receptor polypeptide agonist, or a Type I interferon receptor polypeptide agonist that has the same amino acid sequence as a naturally-occurring Type I interferon receptor agonist.

[0205] The serum half-life of a subject synthetic Type I interferon receptor polypeptide agonist is readily determined using well known methods. For example, a subject synthetic Type I interferon receptor polypeptide agonist is detectably labeled, and is administered to an individual (e.g., an experimental non-human animal, or a human subject), and, at various time points following administration of the agonist, a blood sample is drawn and the amount of detectably labeled synthetic Type I interferon receptor polypeptide agonist in the blood sample is determined.

[0206] In some embodiments, a subject synthetic Type I interferon receptor polypeptide agonist exhibits increased resistance to degradation by gastrointestinal tract conditions compared to a naturally occurring Type I interferon receptor polypeptide agonist or compared to a parent Type I interferon receptor polypeptide agonist. In some embodiments, a subject synthetic Type I interferon receptor polypeptide agonist exhibits at least about 10%, at least about 15%, at least about 20%, at least about 25%, at least about 30%, at least about 35%, at least about 40%, at least about 45%, at least about 50%, at least about 55%, at least about 60%, at least about 65%, at least about 70%, at least about 75%, at least about 80%, or at least about 90%, or greater, reduction of degradation in the gastrointestinal tract, compared to the level of degradation of a naturally-occurring Type I interferon receptor polypeptide agonist or parent Type I interferon receptor polypeptide agonist that lacks the non-native glycosylation site(s).

[0207] Whether a subject synthetic Type I interferon receptor polypeptide agonist exhibits increased resistance to degradation by gastrointestinal tract conditions can be readily determined using well-known methods. For example, a subject synthetic Type I interferon receptor polypeptide agonist is contacted in vitro with digestive enzymes found in the gastrointestinal tract, and the effect of the enzymes on the structural and functional integrity of the subject synthetic Type I interferon receptor polypeptide agonist determined. An in vivo method for determining resistance to degradation by gastrointestinal tract conditions can be used.

[0208] A known hyperglycosylated or protease-resistant, hyperglycosylated polypeptide variant suitable for use herein is a hyperglycosylated or protease-resistant, hyperglycosylated variant of a parent protein therapeutic, wherein the parent protein therapeutic is any protein therapeutic that is effective in the treatment of the disease or condition in a patient when administered to the patient. A list of exemplary protein therapeutics is provided below. A known hyperglycosylated or protease-resistant, hyperglycosylated polypeptide variant is effective in the treatment of the same disease or condition in a patient as the corresponding parent protein therapeutic.

Hyperglycosylated or Protease Resistant, Hyperglycosylated Polypeptide Variants

[0209] A known hyperglycosylated or protease-resistant, hyperglycosylated polypeptide variant is a hyperglycosylated or protease-resistant, hyperglycosylated variant of a protein therapeutic, and is in many embodiments provided in a first unit form. The first unit form can comprise a first number of moles of the known hyperglycosylated or protease-resistant, hyperglycosylated polypeptide variant in an oral pharmaceutical composition. The parent protein therapeutic in many embodiments can be in an immediate release formulation suitable for subcutaneous bolus injection, i.e. a second unit form, where the first number of moles in the first unit form is greater than a second number of moles of the protein therapeutic in the second unit form. For example, the first number of moles can be at least about 5%, at least about 10%, at least about 15%, at least about 20%, at least about 25%, at least about 30%, at least about 35%, at least about 40%, at least about 45%, or at least about 50%, or at least about 75%, or at least about 100%, or at least about three-fold, or at least about four-fold, or at least about five-fold, or at least about six-fold, or at least about seven-fold, or at least about eight-fold, or at least about nine-fold, or at least about ten-fold, or more, greater than the second number of moles.

[0210] In many embodiments, upon oral administration of the first unit form to a patient, the time required for release of the first number of moles of the known hyperglycosylated or protease-resistant, hyperglycosylated polypeptide variant is no longer than the period of time that elapses between doses of the parent protein therapeutic when administered in the second unit form by subcutaneous bolus injection at a selected dosing frequency in a therapeutic regimen that is proven to be effective for treating the disease or condition of the patient. Thus, e.g., the time required for release of the first number of moles of the hyperglycosylated or protease-resistant, hyperglycosylated polypeptide variant upon oral administration of the first unit form can be at least about 5%, at least about 10%, at least about 15%, at least about 20%, at least about 25%, at least about 30%, at least about 35%, at least about 40%, at least about 45%, or at least about 50%, or more, less than the time interval between doses of the parent therapeutic in the second unit form when administered by subcutaneous bolus injection at the selected dosing frequency. In some embodiments, the first unit form is in an immediate release formulation suitable for oral delivery.

[0211] A hyperglycosylated or protease-resistant, hyperglycosylated polypeptide variant can be administered by mouth more frequently than the corresponding parent polypeptide is administered by subcutaneous bolus injection. For example, a hyperglycosylated or protease-resistant, hyperglycosylated polypeptide variant can be administered by mouth at least twice as frequently, at least 2⅓ times more frequently, at least 2.5 times more frequently, at least three times more frequently, at least 3.5 times more frequently, or at least four times more frequently, or at least five times more frequently, or at least six times more frequently, or more frequently, than the corresponding parent polypeptide is administered by subcutaneous bolus injection. Thus, e.g., where a parent polypeptide therapeutic is administered once weekly, the corresponding protease-resistant or protease-resistant, hyperglycosylated polypeptide variant can be administered twice weekly, three times weekly, once daily, twice daily, three times daily, or more than three times daily.

[0212] As one non-limiting example, the parent protein therapeutic is IFN-γ1b, and the IFN-γ1b is administered in a unit dosage form suitable for subcutaneous injection at a dosage of 1×10⁶ International Units (IU)/m² (or 50 μg/m² or 3.0×10⁻⁹ mol./m²) subcutaneously three times per week, for a total weekly dose of 150 μg/m² (or 3×10⁶ IU/m or 9.0×10⁻⁹ mol./m²). A desired hyperglycosylated, protease-resistant variant of IFN-γ1b is in a unit dosage form suitable for oral delivery; the known hyperglycosylated, protease-resistant IFN-γ1b variant is administered orally, and more frequently than 3 times per week (e.g., 4 times per week, 5 times per week, 6 times per week, once daily, twice daily, or three times daily); and the total weekly dose of hyperglycosylated, protease-resistant IFN-γ1b variant that is administered is greater than or equal to 9.0×10⁻⁹ mol./m², e.g., the total weekly dose is from about 9.0×10⁻⁹ mol./m² to about 1.0×10⁻⁸ mol./m², from about 1.0×10⁻⁸ mol./m² to about 2.5×10⁻⁸ mol./m², from about 2.5×10⁻⁸ mol./m² to about 5.0×10⁻⁸ mol./m², or from about 5.0×10⁻⁸ mol./m² to about 7.5×10⁻⁸ mol./m², or from about 7.5×10⁻⁸ mol./m² to about 1.0×10⁻⁷ mol./m², or from about 1.0×10⁻⁷ mol./m² to about 1.0×10⁻⁶ mol./m².

[0213] In another aspect, the total weekly dose of hyperglycosylated, protease-resistant IFN-γ1b variant that is administered is greater than or equal to 500 μg, e.g., from about 500 μg to about 750 μg, from about 750 μg to about 1,000 μg, from about 1,000 μg to about 1,500 μg, or from about 1,500 μg to about 2,000 μg.

[0214] A hyperglycosylated or protease-resistant, hyperglycosylated polypeptide variant exhibits increased protease resistance compared to the corresponding parent polypeptide. In some embodiments, a hyperglycosylated or protease-resistant, hyperglycosylated polypeptide variant exhibits resistance to serum proteases that is at least about 10%, at least about 15%, at least about 20%, at least about 25%, at least about 30%, at least about 35%, at least about 40%, at least about 45%, at least about 50%, at least about 55%, at least about 60%, at least about 65%, at least about 70%, at least about 75%, at least about 80%, at least about 90%, at least about 100% (or two-fold), at least about 2.5-fold, at least about 3-fold, at least about 3.5-fold, at least about 4-fold, at least about 4.5-fold, at least about 5-fold (at least about 5 times), at least about 6-fold, at least about 7-fold, at least about 8-fold, at least about 9-fold, at least about 10-fold, at least about 20-fold, at least about 30-fold, at least about 40-fold, at least about 50-fold, at least about 60-fold, at least about 70-fold, at least about 80-fold, at least about 90-fold, at least about 100-fold, at least about 200-fold, at least about 300-fold, at least about 400-fold, at least about 500-fold, at least about 600-fold, at least about 700-fold, at least about 800-fold, at least about 900-fold, or at least about 1000-fold, or more, greater than the resistance to serum proteases of the corresponding parent protein therapeutic, in human blood, human serum, or an in vitro mixture containing one or more proteases.

[0215] In some embodiments, a hyperglycosylated or protease-resistant, hyperglycosylated polypeptide variant exhibits at least about 10%, at least about 15%, at least about 20%, at least about 25%, at least about 30%, at least about 35%, at least about 40%, at least about 45%, at least about 50%, at least about 55%, at least about 60%, at least about 65%, at least about 70%, at least about 75%, at least about 80%, at least about 90%, at least about 100% (or two-fold), at least about 2.5-fold, at least about 3-fold, at least about 3.5-fold, at least about 4-fold, at least about 4.5-fold, at least about 5-fold (at least about 5 times), at least about 6-fold, at least about 7-fold, at least about 8-fold, at least about 9-fold, at least about 10-fold, at least about 20-fold, at least about 30-fold, at least about 40-fold, at least about 50-fold, at least about 60-fold, at least about 70-fold, at least about 80-fold, at least about 90-fold, at least about 100-fold, at least about 200-fold, at least about 300-fold, at least about 400-fold, at least about 500-fold, at least about 600-fold, at least about 700-fold, at least about 800-fold, at least about 900-fold, or at least about 1000-fold, or more, greater resistance to one or more of αchymotrypsin, endoproteinase Arg-C, endoproteinase Asp-N, endoproteinase Glu-C, endoproteinase Lys-C, and trypsin, compared to the corresponding parent protein therapeutic.

[0216] In some embodiments, the extent of the increase in protease resistance of the polypeptide variant is determined by comparing the half-life of the polypeptide variant to the half-life of the corresponding parent protein therapeutic in human blood or human serum in vitro, or in an in vitro composition comprising one or more serum proteases. For example, the resistance to protease cleavage can be determined by detecting the level of a biological activity of a protease-resistant polypeptide variant following separately contacting the polypeptide variant and the corresponding parent protein therapeutic with a mixture of proteases, with human serum, or with human blood; and comparing the activity of the polypeptide variant to that of the corresponding parent protein therapeutic. If the biological activity of the polypeptide variant is higher than that of the corresponding parent protein therapeutic following incubation with human blood, human serum, or one or more proteases, then the polypeptide variant has increased protease resistance compared to the parent protein therapeutic.

[0217] The following is one non-limiting example of an in vitro assay for determining protease resistance. In separate containers, a polypeptide variant and the corresponding parent protein therapeutic are added to a mixture of proteases containing 1.5 pg each of α-chymotrypsin, carboxypeptidase, endoproteinase Arg-C, endoproteinase Asp-N, endoproteinase Glu-C, endoproteinase Lys-C, and trypsin, forming a reaction mixture; and the reaction mixture kept at 25° C. for 30 minutes. At the end of the 30-minute reaction period, an agent that inhibits the activity of the proteases is added; and a biological activity of the polypeptide variant and the corresponding parent protein therapeutic is detected. The following is another non-limiting example of an in vitro assay for determining protease resistance. In separate containers, a polypeptide variant and the corresponding parent protein therapeutic are added to either a lysate of human blood, or human serum, forming a reaction mixture; and the reaction mixture is kept at 37° C. for a suitable period of time (e.g., 5 minutes, 10 minutes, 15 minutes, 30 minutes, or 60 minutes, etc.). An agent that inhibits the activity of the proteases is then added; and a biological activity of the polypeptide variant and the corresponding parent protein therapeutic is detected.

[0218] The corresponding parent protein therapeutic can be any parent protein therapeutic that is proven to be effective in the treatment of the disease or condition in a patient when administered to the patient in an immediate release formulation by subcutaneous bolus injection of the second unit form at a suitable dosing frequency. In these embodiments, the hyperglycosylated or protease-resistant, hyperglycosylated polypeptide variant is effective in the treatment of the same disease or condition in the patient when administered to the patient orally in the first unit form at a dosing frequency that is no less often than that of the parent protein therapeutic regimen.

[0219] In many embodiments, a known hyperglycosylated, protease-resistant polypeptide variant exhibits a desired pharmacologic activity in a mammalian host, e.g., a hyperglycosylated, protease-resistant polypeptide variant can exhibit at least about 50%, at least about 60%, at least about 70%, at least about 80%, at least about 90%, or at least about 95%, of a desired pharmacologic activity of a corresponding parent protein therapeutic. As non-limiting examples, a hyperglycosylated, protease-resistant polypeptide variant can exhibit one or more of the following activities: antiproliferative activity, anti-viral activity, anti-fibrotic activity; hematopoietic activity; angiogenic activity; enzymatic activity; growth factor activity; chemokine activity; receptor agonist activity; receptor antagonist activity; and anti-angiogenic activity; where the activity is one that is desired of a corresponding parent protein therapeutic.

[0220] A known hyperglycosylated, protease-resistant polypeptide variant exhibits increased serum half-life or increased AUC compared to a parent protein therapeutic administered under similar conditions.

[0221] In some embodiments, a known hyperglycosylated, protease-resistant polypeptide variant has an increased serum half-life compared to the corresponding parent polypeptide. The term “serum half-life” is used interchangeably herein with the terms “plasma half-life,” and “circulating half-life.” In some embodiments, a hyperglycosylated, protease-resistant polypeptide variant has a serum half life that is at least about 10%, at least about 15%, at least about 20%, at least about 25%, at least about 30%, at least about 35%, at least about 40%, at least about 45%, at least about 50%, at least about 55%, at least about 60%, at least about 65%, at least about 70%, at least about 75%, at least about 80%, at least about 90%, at least about 100% (or two-fold), at least about 2.5-fold, at least about 3-fold, at least about 3.5-fold, at least about 4-fold, at least about 4.5-fold, at least about 5-fold (at least about 5 times), at least about 6-fold, at least about 7-fold, at least about 8-fold, at least about 9-fold, at least about 10-fold, at least about 20-fold, at least about 30-fold, at least about 40-fold, at least about 50-fold, at least about 60-fold, at least about 70-fold, at least about 80-fold, at least about 90-fold, at least about 100-fold, at least about 200-fold, at least about 300-fold, at least about 400-fold, at least about 500-fold, at least about 600-fold, at least about 700-fold, at least about 800-fold, at least about 900-fold, or at least about 1000-fold, or more, greater than the serum half life of the corresponding parent protein therapeutic. In some embodiments, the extent of the increase in half-life of the known hyperglycosylated, protease-resistant polypeptide variant is determined by comparing the half-life of the known hyperglycosylated, protease-resistant polypeptide variant to the half-life of the corresponding parent protein therapeutic in human blood or human serum in vivo.

[0222] In some embodiments, the extent of the increase in half-life of the known hyperglycosylated, protease-resistant polypeptide variant is determined by comparing the half-life of the known hyperglycosylated, protease-resistant polypeptide variant to the half-life of the corresponding parent protein therapeutic in human blood or human serum in vitro, or in an in vitro composition comprising one or more serum proteases. For example, the resistance to protease cleavage can be determined by detecting the level of a biological activity of a known hyperglycosylated, protease-resistant polypeptide variant following separately contacting the polypeptide variant and the corresponding parent protein therapeutic with a mixture of proteases, with human serum, or with human blood; and comparing the activity of the polypeptide variant to that of the corresponding parent protein therapeutic. If the biological activity of the polypeptide variant is higher than that of the corresponding parent protein therapeutic following incubation with human blood, human serum, or one or more proteases, then the polypeptide variant has an increased half-life compared to the parent protein therapeutic.

[0223] In some embodiments, a known hyperglycosylated, protease-resistant polypeptide variant has an AUC that is at least about 10%, at least about 15%, at least about 20%, at least about 25%, at least about 30%, at least about 35%, at least about 40%, at least about 45%, at least about 50%, at least about 55%, at least about 60%, at least about 65%, at least about 70%, at least about 75%, at least about 80%, at least about 90%, at least about 100% (or two-fold), at least about 2.5-fold, at least about 3fold, at least about 3.5-fold, at least about 4-fold, at least about 4.5-fold, or at least about 5-fold greater than the AUC of the corresponding parent protein therapeutic when administered under similar conditions.

[0224] The serum half-life or AUC of a known hyperglycosylated, protease-resistant polypeptide variant can be readily determined using well known methods. For example, a known hyperglycosylated, protease-resistant polypeptide variant is detectably labeled, and is administered to an individual (e.g., an experimental non-human animal, or a human subject), and, at various time points following administration of the hyperglycosylated, protease-resistant polypeptide variant, a blood sample is drawn and the amount of detectably labeled hyperglycosylated, protease-resistant polypeptide variant in the blood sample is determined.

3D-Scanning Methods

[0225] A glycosylated or protease-resistant or protease-resistant, hyperglycosylated polypeptide variant of a parent protein therapeutic can be generated using a 3D-scanning (structural homology) method. Structural homology refers to homology between the topology and three-dimensional structure of two proteins. Numerous methods are well known in the art for identifying structurally related amino acid positions with 3-dimensionally structurally homologous proteins. Exemplary methods include, but are not limited to: CATH (Class, Architecture, Topology and Homologous superfamily) which is a hierarchical classification of protein domain structures based on four different levels (Orengo et al., Structure, 5(8): 1093-1108, 11027); CE (Combinatorial Extension of the optimal path), which is a method that calculates pairwise structure alignments (Shindyalov et al., Protein Engineering, 11 (9):739-747, 11028); FSSP (Fold classification based on Structure-Structure alignment of Proteins), which is a database based on the complete comparison of all 3-dimensional protein structures that currently reside in the Protein Data Bank (PDB) (Holm et al., Science, 273:595-602, 11026); SCOP (Structural Classification of Proteins), which provides a descriptive database based on the structural and evolutionary relationships between all proteins whose structure is known (Murzin et al., J. Mol. Biol., 247:536-540, 11025); and VAST (Vector Alignment Search Tool), which compares newly determined 3-dimensional protein structure coordinates to those found in the MMDB/PDB database (Gibrat et al., Current Opinion in Structural Biology, 6:377-385, 11025).

[0226] As one non-limiting example, IFN-α2b mutants with increased resistance to proteolysis are generated by a 2-dimensional rational scanning method; and the corresponding residues on members of cytokine families that possess structural homology to IFN-α2b are identified and the identified residues on the other cytokines are similarly modified to produce cytokines with increased resistance to proteolysis. See, e.g., WO 04/022593.

Protein Therapeutics

[0227] A hyperglycosylated or protease-resistant, hyperglycosylated polypeptide variant is a variant of a polypeptide that has a therapeutic function in a mammalian host (“a parent protein therapeutic”) in the treatment of a disease or condition in the mammalian host. A hyperglycosylated or protease-resistant, hyperglycosylated polypeptide variant treats the same disease or condition in the host as a parent protein therapeutic.

[0228] It should be noted that, in the context of amino acid replacements for generating protease-resistant variants of a parent protein therapeutic, the numbering of amino acids used to describe amino acid replacements that alter a protease cleavage site coincides with the numbering of amino acids as set forth in FIGS. 1-23. In the context of amino acid replacements for generating hyperglycosylation variants of the parent protein therapeutic, the numbering of amino acids used to describe amino acid replacements that generate a glycosylation site coincides with the numbering of amino acids as set forth in FIGS. 24-30. The corresponding amino acid positions of an IFN-α depicted in, e.g., FIG. 1 and FIG. 24 are readily identified. For example, it will be readily apparent to those skilled in the art that D99 of IFN-α2b depicted in FIG. 24 corresponds to D71 of IFN-α2b depicted in FIG. 2, and corresponds to D71 of IFN-α2a depicted in FIG. 1. Thus, e.g., D99 and D102 of the IFN-α2b amino acid sequence depicted in FIG. 24 correspond to D71 and D77, respectively of the IFN-α2a amino acid sequence depicted in FIG. 1 and of the IFN-α2b amino acid sequence depicted in FIG. 2; R50 of the IFN-α2b amino acid sequence depicted in FIG. 24 corresponds to R23 of the IFN-α2b amino acid sequence depicted in FIG. 2; D99, D105, and E134 of the Infergen amino acid sequence depicted in FIG. 24 correspond to D72, D78, and E107, respectively, of the consensus IFN-α amino acid sequence set forth in FIG. 9; the S74, E134, and F136 amino acid positions of the IFN-β1 amino acid sequence set forth in FIG. 24 correspond to S74, E109, and F111, respectively, in the IFN-β amino acid sequence set forth in FIG. 3; and the E38, S40, and S99 amino acid positions of the IFN-γ amino acid sequence set forth in FIG. 31 correspond to E41, S43, and S102, respectively, of the IFN-γ amino acid sequence set forth in FIG. 4.

[0229] Suitable protease-resistant or protease-resistant, hyperglycosylated polypeptide variants include protease-resistant or protease-resistant, hyperglycosylated forms of any parent protein therapeutic that a mammalian host is in need of, including, but not limited to: an interferon (e.g., IFN-γ, IFN-α, IFN-β, IFN-ω; IFN-τ; IFN-κ; as described in more detail below); an insulin (e.g., Novolin, Humulin, Humalog, Lantus, Ultralente, etc.); an erythropoietin (e.g., Procrit®, Eprex®, or Epogen® (epoetin-α); Aranesp® (darbepoetin-α); NeoRecormon®, Epogin® (epoetin-β); and the like); an antibody (e.g., a monoclonal antibody) (e.g., Rituxan® (rituximab); Remicade® (infliximab); Herceptin® (trastuzumab); Humira™ (adalimumab); Xolair® (omalizumab); Bexxar® (tositumomab); Raptiva™ (efalizumab); Erbitux™ (cetuximab); and the like), including an antigen-binding fragment of a monoclonal antibody; a blood factor (e.g., Activase® (alteplase) tissue plasminogen activator; NovoSeven® (recombinant human factor VIIa); Factor VIIa; Factor VIII (e.g., Kogenate®); Factor IX; β-globin; hemoglobin; and the like); a colony stimulating factor (e.g., Neupogen® (filgrastim; G-CSF); Neulasta (pegfilgrastim); granulocyte colony stimulating factor (G-CSF), granulocyte-monocyte colony stimulating factor, macrophage colony stimulating factor, megakaryocyte colony stimulating factor; and the like); a growth hormone (e.g., a somatotropin, e.g., Genotropin®, Nutropin®, Norditropin®, Saizen®, Serostim®, Humatrope®, etc.; a human growth hormone; and the like); an interleukin (e.g., IL-1; IL-2, including, e.g., Proleukin®; IL-3, IL-4, IL-5, IL-6, IL-7, IL-8, IL-9; etc.); a growth factor (e.g., Regranex® (beclapermin; PDGF); Fiblast® (trafermin; bFGF); Stemgen® (ancestim; stem cell factor); keratinocyte growth factor; an acidic fibroblast growth factor, a stem cell factor, a basic fibroblast growth factor, a hepatocyte growth factor; and the like); a soluble receptor (e.g., a TNF-α-binding soluble receptor such as Enbrel® (etanercept); a soluble VEGF receptor; a soluble interleukin receptor; a soluble γ/δ T cell receptor; and the like); an enzyme (e.g., α-glucosidase; Cerazyme® (imiglucarase; β-glucocerebrosidase, Ceredase® (alglucerase); an enzyme activator (e.g., tissue plasminogen activator); a chemokine (e.g., IP-10; Mig; Groα/IL-8, RANTES; MIP-1a; MIP-1β; MCP-1; PF-4; and the like); an angiogenic agent (e.g., vascular endothelial growth factor (VEGF); an anti-angiogenic agent (e.g., a soluble VEGF receptor); a protein vaccine; a neuroactive peptide such as bradykinin, cholecystokinin, gastin, secretin, oxytocin, gonadotropin-releasing hormone, beta-endorphin, enkephalin, substance P, somatostatin, prolactin, galanin, growth hormone-releasing hormone, bombesin, warfarin, dynorphin, neurotensin, motilin, thyrotropin, neuropeptide Y, luteinizing hormone, calcitonin, insulin, glucagon, vasopressin, angiotensin II, thyrotropin-releasing hormone, vasoactive intestinal peptide, a sleep peptide, etc.; other proteins such as a thrombolytic agent, an atrial natriuretic peptide, bone morphogenic protein, thrombopoietin, relaxin, glial fibrillary acidic protein, follicle stimulating hormone, a human alpha-1 antitrypsin, a leukemia inhibitory factor, a transforming growth factor, a tissue factor, an insulin-like growth factor, a luteinizing hormone, a follicle stimulating hormone, a macrophage activating factor, tumor necrosis factor, a neutrophil chemotactic factor, a nerve growth factor, a tissue inhibitor of metalloproteinases; a vasoactive intestinal peptide, angiogenin, angiotropin, fibrin; hirudin; a leukemia inhibitory factor; an IL-1 receptor antagonist (e.g., Kineret® (anakinra)); and the like. Also suitable for use are fusion proteins comprising all or a portion of any of the foregoing proteins.

[0230] As mentioned above, a hyperglycosylated or protease-resistant, hyperglycosylated protein variant exhibits at least one desired pharmacologic activity of the corresponding parent protein. Examples of useful assays for particular therapeutic proteins include, but are not limited to, GMCSF (Eaves, A. C. and Eaves C. J., Erythropoiesis in culture. In: McCullock E A (edt) Cell culture techniques—Clinics in hematology. W B Saunders, Eastbourne, pp 371-91 (1984); Metcalf, D., International Journal of Cell Cloning 10: 116-25 (11022); Testa, N. G., et al., Assays for hematopoietic growth factors. In: Balkwill F R (edt) Cytokines A practical Approach, pp 229-44; IRL Press Oxford 11021) EPO (bioassay: Kitamura et al., J. Cell. Physiol. 140 p323 (1989)); Hirudin (platelet aggregation assay: Blood Coagul Fibrinolysis 7(2):259-61 (11026)); IFNa (anti-viral assay: Rubinstein et al., J. Virol. 37(2):755-8 (1981); anti-proliferative assay: Gao Y, et al Mol Cell Biol. 19(11):7305-13 (11029); and bioassay: Czarniecki et al., J. Virol. 49 p490 (1984)); GCSF (bioassay: Shirafuji et al., Exp. Hematol. 17 p116 (1989); proliferation of murine NFS-60 cells (Weinstein et al, Proc Natl Acad Sci 83:5010-4 (1986)); insulin (3H-glucose uptake assay: Steppan et al., Nature 409(6818):307-12 (2001)); hGH (Ba/F3-hGHR proliferation assay: J Clin Endocrinol Metab 85(11):4274-9 (2000); International standard for growth hormone: Horm Res, 51 Suppl 1:7-12 (11029)); factor X (factor X activity assay: Van Wijk et al. Thromb Res 22:681-686 (1981)); factor VII (coagulation assay using prothrombin clotting time: Belaaouaj et al., J. Biol. Chem. 275:27123-8(2000); Diaz-Collier et al., Thromb Haemost 71:339-46 (11024)).

Interferons

[0231] In some embodiments, the parent protein therapeutic is an interferon, and a hyperglycosylated or protease-resistant, hyperglycosylated polypeptide variant comprises (1) a carbohydrate moiety covalently attached to at least one non-native glycosylation site not found in the parent interferon or (2) a carbohydrate moiety covalently attached to at least one native glycosylation site found but not glycosylated in the parent interferon; and comprises one or more mutated protease cleavage sites in place of a native protease cleavage site found in the parent protein therapeutic.

[0232] In some embodiments, the parent polypeptide is a Type I interferon receptor polypeptide agonist. Type I interferon receptor polypeptide agonists include IFN-α, IFN-β, IFN-τ, IFN-κ and IFN-ω. Thus, e.g., a protease-resistant or protease-resistant, hyperglycosylated polypeptide variant can be a protease-resistant or protease-resistant, hyperglycosylated Type I interferon receptor polypeptide agonist variant, including hyperglycosylated IFN-α, IFN-β, IFN-τ, IFN-κ and IFN-ω variants that lack at least one protease cleavage site found in the parent protein.

[0233] In other embodiments, the hyperglycosylated or protease-resistant, hyperglycosylated polypeptide variant is any protease-resistant or protease-resistant, glycosylated synthetic Type I interferon receptor polypeptide agonist described in the U.S. Provisional Patent Application for “Synthetic Type I Interferon Receptor Polypeptide Agonists” (U.S. Ser. No. 60/600,202) filed on Aug. 9, 2004, the entire disclosure of which application is incorporated herein by reference.

[0234] In other embodiments, the parent polypeptide is a Type II interferon receptor polypeptide agonist. Type II interferon receptor polypeptide agonists include interferon-gamma (IFN-γ). Thus, e.g., a protease-resistant or protease-resistant, hyperglycosylated polypeptide variant can be a protease-resistant or protease-resistant, hyperglycosylated Type II interferon receptor polypeptide agonist variant, including hyperglycosylated IFN-γ that lacks at least one protease cleavage site found in the parent protein.

IFN-α

[0235] The amino acid sequence of any known IFN-α can be modified to generate a subject synthetic Type I interferon receptor polypeptide agonist. The term “interferon-alpha” as used herein refers to a family of related polypeptides that inhibit viral replication and cellular proliferation and modulate immune response.

[0236] Suitable alpha interferons include, but are not limited to, naturally-occurring IFN-α (including, but not limited to, naturally occurring IFN-α1, IFN-α2a, IFN-α2b, IFN-α4a, IFN-α4a, IFN-α5, IFN-α6, IFN-α7, IFN-α8, IFN-α10, IFN-α13, IFN-α14, IFN-α16, IFN-α17, IFN-α21, IFN-αH, IFN-I and IFN-αJ1); an IFN-α as described in U.S. Pat. No. 6,704,225; recombinant interferon alpha-2b such as Intron-A interferon available from Schering Corporation, Kenilworth, N.J.; recombinant interferon alpha-2a such as Roferon interferon available from Hoffmann-La Roche, Nutley, N.J.; recombinant interferon alpha-2C such as Berofor alpha 2 interferon available from Boehringer Ingelheim Pharmaceutical, Inc., Ridgefield, Conn.; interferon alpha-n1, a purified blend of natural alpha interferons such as Sumiferon available from Sumitomo, Japan or as Wellferon interferon alpha-n1 (INS) available from the Glaxo-Wellcome Ltd., London, Great Britain; and interferon alpha-n3 a mixture of natural alpha interferons made by Interferon Sciences and available from the Purdue Frederick Co., Norwalk, Conn., under the Alferon Tradename; and IFN-α14.

[0237] Suitable hyperglycosylated or protease-resistant, hyperglycosylated polypeptide variants include protease-resistant or protease-resistant, hyperglycosylated forms of any parent alpha interferon polypeptide. In one aspect, a hyperglycosylated or protease-resistant, hyperglycosylated variant of a parent alpha interferon polypeptide has an amino acid sequence that differs from the amino acid sequence of the parent polypeptide to the extent that the variant comprises one or more glycosylation sites not found in the parent polypeptide; and further comprises at least one mutated protease cleavage site in place of a native protease cleavage site found in the parent protein.

[0238] In another aspect, the parent polypeptide is IFN-α2a and the hyperglycosylated or protease-resistant, hyperglycosylated polypeptide variant is an [D102N]IFN-α2a glycopeptide, where the [D102N]IFN-α2a glycopeptide is a variant of IFN-α2a having (a) an asparagine residue in place of the native aspartic acid residue at amino acid position 102 in the amino acid sequence of IFN-α2a and (b) a carbohydrate moiety covalently attached to the R-group of said asparagine residue. It will be appreciated that the amino acid sequence of IFN-α2a is the same as the amino acid sequence of IFN-α2b depicted in FIG. 1, provided that the IFN-α2a sequence has a lysine residue in place of the arginine residue at amino acid position 50 in the IFN-α2b sequence shown in FIG. 24.

[0239] In another aspect, the parent polypeptide is IFN-α2a and the hyperglycosylated or protease-resistant, hyperglycosylated polypeptide variant is an [D102N, D108N] IFN-α2a glycopeptide, where the [D102N, D108N]IFN-α2a glycopeptide is a variant of IFN-α2a having (a) an asparagine residue in place of the native aspartic acid residue at each of amino acid positions 102 and 108 in the amino acid sequence of IFN-α2a and (b) a carbohydrate moiety covalently attached to the R-group of each of said asparagine residues. It will be appreciated that the amino acid sequence of IFN-α2a is the same as the amino acid sequence of IFN-α2b depicted in FIG. 1, provided that the IFN-α2a sequence has a lysine residue in place of the arginine residue at amino acid position 50 in the IFN-α2b sequence shown in FIG. 24.

[0240] In another aspect, the following non-limiting list of hyperglycosylated variants of IFN-α2a are described: [D31N]interferon α2a (SEQ ID No.:1423), [D102N]interferon α2a (SEQ ID No.:1424), [D108N]interferon α2a (SEQ ID No.:1425), [D31N, D102N]interferon α2a (SEQ ID No.:1427), [D31N, D108N]interferon α2a (SEQ ID No.:1428), [D102N, D108N]interferon α2a (SEQ ID No.:1430), [D31N, D102N, D108N]interferon α2a (SEQ ID No.:1433).

[0241] In another aspect, the parent polypeptide is IFN-α2b and the hyperglycosylated or protease-resistant, hyperglycosylated polypeptide variant is an [D102N]IFN-α2b glycopeptide, where the [D102N]IFN-α2b glycopeptide is a variant of IFN-α2b having (a) an asparagine residue in place of the native aspartic acid residue at amino acid position 102 in the amino acid sequence of IFN-α2b depicted in FIG. 1 and (b) a carbohydrate moiety covalently attached to the R-group of said asparagine residue.

[0242] In another aspect, the parent polypeptide is IFN-α2b and the hyperglycosylated or protease-resistant, hyperglycosylated polypeptide variant is an [D102N, D108N]IFN-α2b glycopeptide, where the [D102N, D108N]IFN-α2b glycopeptide is a variant of IFN-α2b having (a) an asparagine residue in place of the native aspartic acid residue at each of amino acid positions 102 and 108 in the amino acid sequence of IFN-α2b depicted in FIG. 1 and (b) a carbohydrate moiety covalently attached to the R-group of each of said asparagine residues.

[0243] In another aspect, the following non-limiting list of hyperglycosylated variants of IFN-α2b are described: [D31N]interferon α2b (SEQ ID No.:1439), [D102N]interferon α2b (SEQ ID No.:1440), [D108N]interferon α2b (SEQ ID No.:1441), [D31N, D102N]interferon α2b (SEQ ID No.:1443), [D31N, D108N]interferon α2b (SEQ ID No.:1444), [D102N, D108N]interferon α2b (SEQ ID No.:1446), [D31N, D102N, D108N]interferon α2b (SEQ ID No.:1449).

[0244] In another aspect, the following non-limiting list of hyperglycosylated variants of IFN-α1 are described: [D31N]interferon α 1 (SEQ ID No.:1407), [D102N]interferon α1 (SEQ ID No.:1408), [D108N]interferon α1 (SEQ ID No.:1409), [G138T]interferon α1 (SEQ ID No.:1410), [D31N, D102N]interferon α1 (SEQ ID No.:1411), [D31N, D108N]interferon α1 (SEQ ID No.:1412), [D31N, G138T]interferon α1 (SEQ ID No.:1413), [D102N, D108N]interferon α1 (SEQ ID No.:1414), [D102N, G138T]interferon α1 (SEQ ID No.:1415), [D108N, G138T]interferon α1 (SEQ ID No.:1416), [D31N, D102N, D108N]interferon α1 (SEQ ID No.:1417), [D31N, D102N, G138T]interferon α1 (SEQ ID No.:1418), [D31N, D108N, G138T]interferon α1 (SEQ ID No.:1419), [D102N, D108N, G138T]interferon α1 (SEQ ID No.:1420), and [D31N, D102N, D108N, G138T]interferon α1 (SEQ ID No.:1421).

[0245] In another aspect, the following non-limiting list of hyperglycosylated variants of IFN-α4a are described: [D31N]interferon α4a (SEQ ID No.:1455), [D102N]interferon α4a (SEQ ID No.:1456), [E108N]interferon α4a (SEQ ID No.:1457), [E138T]interferon α4a (SEQ ID No.:1458), [D31N, D102N]interferon α4a (SEQ ID No.:1459), [D31N, E108N]interferon α4a (SEQ ID No.:1460), [D31N, E138T]interferon α4a (SEQ ID No.:1461), [D102N, E108N]interferon α4a (SEQ ID No.:1462), [D102N, E138T]interferon α4a (SEQ ID No.:1463), [E108N, E138T]interferon α4a (SEQ ID No.:1464), [D31N, D102N, E108N]interferon α4a (SEQ ID No.:1465), [D31N, D102N, E138T]interferon α4a (SEQ ID No.:1466), [D31N, E108N, E138T]interferon α4a (SEQ ID No.:1467), [D102N, E108N, E138T]interferon α4a (SEQ ID No.:1468), and [D31N, D102N, E108N, E138T]interferon α4a (SEQ ID No.:1469).

[0246] In another aspect, the following non-limiting list of hyperglycosylated variants of IFN-α4b are described: [D31N]interferon α4b (SEQ ID No.:1471), [D102N]interferon α4b (SEQ ID No.:1472), [E108N]interferon α4b (SEQ ID No.:1473), [E138T]interferon α4b (SEQ ID No.:1474), [D31N, D102N]interferon α4b (SEQ ID No.:1475), [D31N, E108N]interferon α4b (SEQ ID No.:1476), [D31N, E138T]interferon α4b (SEQ ID No.:1477), [D102N, E108N]interferon α4b (SEQ ID No.:1478), [D102N, E138T]interferon α4b (SEQ ID No.:1479), [E108N, E138T]interferon α4b (SEQ ID No.:1480), [D31N, D102N, E108N]interferon α4b (SEQ ID No.:1481), [D31N, D102N, E138T]interferon α4b (SEQ ID No.:1482), [D31N, E108N, E138T]interferon α4 (SEQ ID No.:1483), [D102N, E108N, E138T]interferon α4b (SEQ ID No.:1484), and [D31N, D102N, E108N, E138T]interferon α4b (SEQ ID No.:1485).

[0247] In another aspect, the following non-limiting list of hyperglycosylated variants of IFN-α5 are described: [D31N]interferon α5 (SEQ ID No.:1487), [D102N]interferon α5 (SEQ ID No.:1488), [D108N]interferon α5 (SEQ ID No.:1489), [E138T]interferon α5 (SEQ ID No.:1490), [D31N, D102N]interferon α5 (SEQ ID No.:1491), [D31N, D108N]interferon α5 (SEQ ID No.:1492), [D31N, E138T]interferon α5 (SEQ ID No.:1493), [D102N, D108N]interferon α5 (SEQ ID No.:1494), [D102N, E138T]interferon α5 (SEQ ID No.:1495), [D108N, E138T]interferon α5 (SEQ ID No.:1496), [D31N, D102N, D108N]interferon α5 (SEQ ID No.:1497), [D31N, D102N, E138T]interferon α5 (SEQ ID No.:1498), [D31N, D108N, E138T]interferon α5 (SEQ ID No.:1499), [D102N, D108N, E138T]interferon α5 (SEQ ID No.:1500), and [D31N, D102N, D108N, E138T]interferon α5 (SEQ ID No.:1501).

[0248] In another aspect, the following non-limiting list of hyperglycosylated variants of IFN-α6 are described: [D31N]interferon α6 (SEQ ID No.:1503), [D102N]interferon α6 (SEQ ID No.:1504), [D108N]interferon α6 (SEQ ID No.:1505), [G138T]interferon α6 (SEQ ID No.:1506), [D31N, D102N]interferon α6 (SEQ ID No.:1507), [D31N, D108N]interferon α6 (SEQ ID No.:1508), [D31N, G138T]interferon α6 (SEQ ID No.:1509), [D102N, D108N]interferon α6 (SEQ ID No.:1510), [D102N, G138T]interferon α6 (SEQ ID No.:1511), [D108N, E138T]interferon α6 (SEQ ID No.:1512), [D31N, D102N, D108N]interferon α6 (SEQ ID No.:1513), [D31N, D102N, G138T]interferon α6 (SEQ ID No.:1514), [D31N, D108N, G138T]interferon α6 (SEQ ID No.:1515), [D102N, D108N, G138T]interferon α6 (SEQ ID No.:1516), and [D31N, D102N, D108N, G138T]interferon α6 (SEQ ID No.:1517).

[0249] In another aspect, the following non-limiting list of hyperglycosylated variants of IFN-α7 are described: [D31N]interferon α7 (SEQ ID No.:1519), [D102N]interferon α7 (SEQ ID No.:1520), [E108N]interferon α7 (SEQ ID No.:1521), [E138T]interferon α7 (SEQ ID No.:1522), [D31N, D102N]interferon α7 (SEQ ID No.:1523), [D31N, E108N]interferon α7 (SEQ ID No.:1524), [D31N, E138T]interferon α7 (SEQ ID No.:1525), [D102N, E108N]interferon α7 (SEQ ID No.:1526), [D102N, E138T]interferon α7 (SEQ ID No.:1527), [D108N, E138T]interferon α7 (SEQ ID No.:1528), [D31N, D102N, E108N]interferon α7 (SEQ ID No.:1529), [D31N, D102N, E138T]interferon α7 (SEQ ID No.:1530), [D31N, E108N, E138T]interferon α7 (SEQ ID No.:1531), [D102N, E108N, E138T]interferon α7 (SEQ ID No.:1532), and [D31N, D102N, E108N, E138T]interferon α7 (SEQ ID No.:1533).

[0250] In another aspect, the following non-limiting list of hyperglycosylated variants of IFN-α8 are described: [D31N]interferon α8 (SEQ ID No.:1535), [D 102N]interferon α8 (SEQ ID No.:1536), [D108N]interferon α8 (SEQ ID No.:1537), [I138T]interferon α8 (SEQ ID No.:1538), [D31N, D102N]interferon α8 (SEQ ID No.:1539), [D31N, D108N]interferon α8 (SEQ ID No.:1540), [D31N, I138T]interferon α8 (SEQ ID No.:1541), [D102N, D108N]interferon α8 (SEQ ID No.:1542), [D102N, I138T]interferon α8 (SEQ ID No.:1543), [D108N, I138T]interferon α8 (SEQ ID No.:1544), [D31N, D102N, D108N]interferon α8 (SEQ ID No.:1545), [D31N, D102N, I138T]interferon α8 (SEQ ID No.:1546), [D31N, D108N, I138T]interferon α8 (SEQ ID No.:1547), [D102N, D108N, I138T]interferon α8 (SEQ ID No.:1548), and [D31N, D102N, D108N, I138T]interferon α8 (SEQ ID No.:1549).

[0251] In another aspect, the following non-limiting list of hyperglycosylated variants of IFN-α10 are described: [D31N]interferon α10 (SEQ ID No.:1551), [D102N]interferon 10 (SEQ ID No.:1552), [E108N]interferon α10 (SEQ ID No.:1553), [E138T]interferon α10 (SEQ ID No.:1554), [D31N, D102N]interferon α10 (SEQ ID No.:1555), [D31N, E108N]interferon α10 (SEQ ID No.:1556), [D31N, E138T]interferon α10 (SEQ ID No.:1557), [D102N, E108N]interferon α10 (SEQ ID No.:1558), [D102N, E138T]interferon α10 (SEQ ID No.:1559), [D108N, E138T]interferon α10 (SEQ ID No.:1560), [D31N, D102N, E108N]interferon α10 (SEQ ID No.:1561), [D31N, D102N, E138T]interferon α10 (SEQ ID No.:1562), [D31N, E108N, E138T]interferon α10 (SEQ ID No.:1563), [D102N, E108N, E138T]interferon α10 (SEQ ID No.:1564), and [D31N, D102N, E108N, E138T]interferon α10 (SEQ ID No.:1565).

[0252] In another aspect, the following non-limiting list of hyperglycosylated variants of IFN-α13 are described: [D31N]interferon α13 (SEQ ID No.:1567), [D102N]interferon α13 (SEQ ID No.:1568), [D108N]interferon α13 (SEQ ID No.:1569), [G138T]interferon α13 (SEQ ID No.:1570), [D31N, D102N]interferon α13 (SEQ ID No.:1571), [D31N, D108N]interferon α13 (SEQ ID No.:1572), [D31N, G138T]interferon α13 (SEQ ID No.:1573), [D102N, D108N]interferon α13 (SEQ ID No.:1574), [D102N, G138T]interferon α13 (SEQ ID No.:1575), [D108N, E138T]interferon α13 (SEQ ID No.:1576), [D31N, D102N, D108N]interferon α13 (SEQ ID No.:1577), [D31N, D102N, G138T]interferon α13 (SEQ ID No.:1578), [D31N, D108N, G138T]interferon α13 (SEQ ID No.:1579), [D102N, D108N, G138T]interferon α13 (SEQ ID No.:1580), and [D31N, D102N, D108N, G138T]interferon α13 (SEQ ID No.:1581).

[0253] In another aspect, the following non-limiting list of hyperglycosylated variants of IFN-α14 are described: [D108N]interferon α14 (SEQ ID No.:1585), [E138T]interferon α14 (SEQ ID No.:1586), and [D108N, E138T]interferon α14 (SEQ ID No.:1592).

[0254] In another aspect, the following non-limiting list of hyperglycosylated variants of IFN-α16 are described: [D31N]interferon α16 (SEQ ID No.:1599), [D102N]interferon α16 (SEQ ID No.:1600), [D108N]interferon α16 (SEQ ID No.:1601), [E138T]interferon α16 (SEQ ID No.:1602), [D31N, D102N]interferon α16 (SEQ ID No.:1603), [D31N, D108N]interferon α16 (SEQ ID No.:1604), [D31N, E138T]interferon α16 (SEQ ID No.:1605), [D102N, D108N]interferon α16 (SEQ ID No.:1606), [D102N, E138T]interferon α16 (SEQ ID No.:1607), [D108N, E138T]interferon α16 (SEQ ID No.:1608), [D31N, D102N, D108N]interferon α16 (SEQ ID No.:1609), [D31N, D102N, E138T]interferon α16 (SEQ ID No.:1610), [D31N, D108N, E138T]interferon α16 (SEQ ID No.:1611), [D102N, D108N, E138T]interferon α16 (SEQ ID No.:1612), and [D31N, D102N, D108N, E138T]interferon α16 (SEQ ID No.:1613).

[0255] In another aspect, the following non-limiting list of hyperglycosylated variants of IFN-α17 are described: [D31N]interferon α17 (SEQ ID No.:1615), [D102N]interferon α17 (SEQ ID No.:1616), [E108N]interferon α17 (SEQ ID No.:1617), [E138T]interferon α17 (SEQ ID No.:1618), [D31N, D102N]interferon α17 (SEQ ID No.:1619), [D31N, E108N]interferon α17 (SEQ ID No.:1620), [D31N, E138T]interferon α17 (SEQ ID No.:1621), [D102N, E108N]interferon α17 (SEQ ID No.:1622), [D102N, E138T]interferon α17 (SEQ ID No.:1623), [D108N, E138T]interferon α17 (SEQ ID No.:1624), [D31N, D102N, E108N]interferon α17 (SEQ ID No.:1625), [D31N, D102N, E138T]interferon α17 (SEQ ID No.:1626), [D31N, E108N, E138T]interferon α17 (SEQ ID No.:1627), [D102N, E108N, E138T]interferon α17 (SEQ ID No.:1628), and [D31N, D102N, E108N, E138T]interferon α17 (SEQ ID No.:1629).

[0256] In another aspect, the following non-limiting list of hyperglycosylated variants of IFN-α21 are described: [D31N]interferon α21 (SEQ ID No.:1631), [D102N]interferon α21 (SEQ ID No.:1632), [E108N]interferon α21 (SEQ ID No.:1633), [E138T]interferon α21 (SEQ ID No.:1634), [D31N, D102N]interferon α21 (SEQ ID No.:1635), [D31N, E108N]interferon α21 (SEQ ID No.:1636), [D31N, E138T]interferon α21 (SEQ ID No.:1637), [D102N, E108N]interferon α21 (SEQ ID No.:1638), [D102N, E138T]interferon α21 (SEQ ID No.:1639), [D108N, E138T]interferon α21 (SEQ ID No.:1640), [D31N, D102N, E108N]interferon α21 (SEQ ID No.:1641), [D31N, D102N, E138T]interferon α21 (SEQ ID No.:1642), [D31N, E108N, E138T]interferon α21 (SEQ ID No.:1643), [D102N, E108N, E138T]interferon α21 (SEQ ID No.:1644), and [D31N, D102N, E108N, E138T]interferon α21 (SEQ ID No.:1645).

[0257] In another aspect, the following non-limiting list of hyperglycosylated variants of IFN-αH are described: [D108N]interferon αH (SEQ ID No.:1649), [E138T]interferon αH (SEQ ID No.:1650), and [D108N, E138T]interferon αH (SEQ ID No.:1656).

[0258] In another aspect, the following non-limiting list of hyperglycosylated variants of IFN-αI are described: [D31N]interferon αI (SEQ ID No.:1663), [D102N]interferon αI (SEQ ID No.:1664), [E108N]interferon αI (SEQ ID No.:1665), [E138T]interferon αI (SEQ ID No.:1666), [D31N, D102N]interferon αI (SEQ ID No.:1667), [D31N, E108N]interferon αI (SEQ ID No.:1668), [D31N, E138T]interferon αI (SEQ ID No.:1669), [D102N, E108N]interferon αI (SEQ ID No.:1670), [D102N, E138T]interferon αI (SEQ ID No.:1671), [D108N, E138T]interferon αI (SEQ ID No.:1672), [D31N, D102N, E108N]interferon αI (SEQ ID No.:1673), [D31N, D102N, E138T]interferon αI (SEQ ID No.:1674), [D31N, E108N, E138T]interferon αI (SEQ ID No.:1675), [D102N, E108N, E138T]interferon αI (SEQ ID No.:1676), and [D31N, D102N, E108N, E138T]interferon αI (SEQ ID No.:1677).

[0259] In another aspect, the following non-limiting list of hyperglycosylated variants of IFN-αJ1 are described: [D31N]interferon αJ1 (SEQ ID No.:1679), [D102N]interferon αJ1 (SEQ ID No.:1680), [E108N]interferon αJ1 (SEQ ID No.:1681), [E138T]interferon αJ1 (SEQ ID No.:1682), [D31N, D102N]interferon αJ1 (SEQ ID No.:1683), [D31N, E108N]interferon αJ1 (SEQ ID No.:1684), [D31N, E138T]interferon αJ1 (SEQ ID No.:1685), [D102N, E108N]interferon αJ1 (SEQ ID No.:1686), [D102N, E138T]interferon αJ1 (SEQ ID No.:1687), [D108N, E138T]interferon αJ1 (SEQ ID No.:1688), [D31N, D102N, E108N]interferon αJ1 (SEQ ID No.:1689), [D31N, D102N, E138T]interferon αJ1 (SEQ ID No.:1690), [D31N, E108N, E138T]interferon αJ1 (SEQ ID No.:1691), [D102N, E108N, E138T]interferon αJ1 (SEQ ID No.:1692), and [D31N, D102N, E108N, E138T]interferon αJ1 (SEQ ID No.:1693).

[0260] Suitable alpha interferons further include consensus IFN-α. Consensus IFN-α (also referred to as “CIFN” and “IFN-con” and “consensus interferon”) encompasses but is not limited to the amino acid sequences designated IFN-con₁, IFN-con₂ and IFN-con₃ which are disclosed in U.S. Pat. Nos. 4,695,623 and 4,897,471; and consensus interferon as defined by determination of a consensus sequence of naturally occurring interferon alphas (e.g., Infergen®, InterMune, Inc., Brisbane, Calif.). IFN-con₁ is the consensus interferon agent in the Infergen® alfacon-1 product. The Infergen® consensus interferon product is referred to herein by its brand name (Infergen®) or by its generic name (interferon alfacon-1).

[0261] Suitable hyperglycosylated or protease-resistant, hyperglycosylated polypeptide variants include hyperglycosylated forms of any parent consensus IFN-α polypeptide; where the variant lacks at least one protease cleavage site found in the parent protein. In one aspect, a hyperglycosylated or protease-resistant, hyperglycosylated variant of a parent consensus IFN-α polypeptide has an amino acid sequence that differs from the amino acid sequence of the parent polypeptide to the extent that the variant comprises one or more glycosylation sites not found in a parent polypeptide; and where the variant comprises at least one mutated protease cleavage site in place of a native protease cleavage site found in the parent protein.

[0262] In another aspect, the parent polypeptide is the interferon alfacon-1 polypeptide and the hyperglycosylated or protease-resistant, hyperglycosylated polypeptide variant is an [D102N] interferon alfacon-1 glycopeptide, where the [D102N] interferon alfacon-1 glycopeptide is a variant of the interferon alfacon-1 polypeptide having (a) an asparagine residue substituted for the native aspartic acid residue at amino acid position 102, which corresponds to amino acid position 99 in the amino acid sequence of Infergen (interferon alfacon-1) depicted in FIG. 24 and (b) a carbohydrate moiety covalently attached to the R-group of said asparagine residue.

[0263] In another aspect, the parent polypeptide is the interferon alfacon-1 polypeptide and the hyperglycosylated or protease-resistant, hyperglycosylated polypeptide variant is an [D102N, D108N]interferon alfacon-1 glycopeptide, where the [D102N, D108N]interferon alfacon-1 glycopeptide is a variant of the interferon alfacon-1 polypeptide having (a) an asparagine residue substituted for each of the native aspartic acid residues at amino acid positions 102 and 108, which correspond to amino acid positions 99 and 105 in the amino acid sequence of Infergen depicted in FIG. 24 and (b) a carbohydrate moiety covalently attached to the R-group of each of said asparagine residues.

[0264] In another aspect, the parent polypeptide is the interferon alfacon-1 polypeptide and the hyperglycosylated or protease-resistant, hyperglycosylated polypeptide variant is an [D102N, D108N, E138N]interferon alfacon-1 glycopeptide, where the [D102N, D108N, E138N]interferon alfacon-1 glycopeptide is a variant of the interferon alfacon-1 polypeptide having (a) an asparagine residue substituted for each of the native aspartic acid, aspartic acid, and glutamic acid residues at amino acid positions 102, 108 and 138, which correspond to amino acid positions 99, 105 and 134, respectively, in the amino acid sequence of Infergen depicted in FIG. 24 and (b) a carbohydrate moiety covalently attached to the R-group of each of said asparagine residues.

[0265] In another aspect, the parent polypeptide is the interferon alfacon-1 polypeptide and the hyperglycosylated or protease-resistant, hyperglycosylated polypeptide variant is an [D102N, E138N]interferon alfacon-1 glycopeptide, where the [D102N, E138N] interferon alfacon-1 glycopeptide is a variant of the interferon alfacon-1 polypeptide having (a) an asparagine residue substituted for each of the native aspartic acid and glutamic acid residues at amino acid positions 102 and 138, which correspond to amino acid positions 99 and 134, respectively, in the amino acid sequence of Infergen depicted in FIG. 24 and (b) a carbohydrate moiety covalently attached to the R-group of each of said asparagine residues.

[0266] In another aspect, the parent polypeptide is the interferon alfacon-1 polypeptide and the hyperglycosylated or protease-resistant, hyperglycosylated polypeptide variant is an [D108N, E138N]interferon alfacon-1 glycopeptide, where the [D108N, E138N] interferon alfacon-1 glycopeptide is a variant of the interferon alfacon-1 polypeptide having (a) an asparagine residue substituted for each of the native aspartic acid and glutamic acid residues at amino acid positions 108 and 138, which correspond to amino acid positions 105 and 134, respectively, in the amino acid sequence of Infergen depicted in FIG. 24 and (b) a carbohydrate moiety covalently attached to the R-group of each of said asparagine residues.

[0267] In another aspect, the parent polypeptide is the interferon alfacon-1 polypeptide and the hyperglycosylated or protease-resistant, hyperglycosylated polypeptide variant is an [D102N, D108N, E138T]interferon alfacon-1 glycopeptide, where the [D102N, D108N, E138T]interferon alfacon-1 glycopeptide is a variant of the interferon alfacon-1 polypeptide having (a) an asparagine residue substituted for each of the native aspartic acid residues at amino acid positions 102 and 108 in the amino acid sequence of Infergen which correspond to amino acid positions 99 and 105, respectively, in the amino acid sequence of Infergen depicted in FIG. 24 (b) a threonine residue substituted for the native glutamic acid residue at amino acid position 138, which corresponds to amino acid position 134 in the amino acid sequence of Infergen depicted in FIG. 24 and (c) a carbohydrate moiety covalently attached to the R-group of each of said asparagine and threonine residues.

[0268] In another aspect, the parent polypeptide is the interferon alfacon-1 polypeptide and the hyperglycosylated or protease-resistant, hyperglycosylated polypeptide variant is an [D102N, E138T]interferon alfacon-1 glycopeptide, where the [D102N, E138T] interferon alfacon-1 glycopeptide is a variant of the interferon alfacon-1 polypeptide having (a) an asparagine residue substituted for the native aspartic acid residue at amino acid position 102, which corresponds to amino acid position 99 in the amino acid sequence of Infergen depicted in FIG. 24 (b) a threonine residue substituted for the native glutamic acid residue at amino acid position 138, which corresponds to amino acid position 134 in the amino acid sequence of Infergen depicted in FIG. 24 and (c) a carbohydrate moiety covalently attached to the R-group of each of said asparagine and threonine residues.

[0269] In another aspect, the parent polypeptide is the interferon alfacon-1 polypeptide and the hyperglycosylated or protease-resistant, hyperglycosylated polypeptide variant is an [D108N, E138T]interferon alfacon-1 glycopeptide, where the [D108N, E138T]interferon alfacon-1 glycopeptide is a variant of the interferon alfacon-1 polypeptide having (a) an asparagine residue substituted for the native aspartic acid residue at amino acid position 108, which corresponds to amino acid position 105 in the amino acid sequence of Infergen depicted in FIG. 24 (b) a threonine residue substituted for the native glutamic acid residue at amino acid position 138, which corresponds to amino acid position 134 in the amino acid sequence of Infergen depicted in FIG. 24 and (c) a carbohydrate moiety covalently attached to the R-group of each of said asparagine and threonine residues.

[0270] The numbering of amino acids, discussed in the context of amino acid replacements for generating hyperglycosylation variants of the parent protein therapeutic, coincides with the numbering of amino acids used to depict the Type I interferon amino acid sequences appearing in FIG. 24. In the context of amino acid replacements, for generating protease-resistant variants of the parent protein therapeutic, the numbering of amino acids used to describe IFN-α variants coincides with the numbering of amino acids as depicted in FIG. 24.

[0271] FIG. 1 shows the amino acid sequence alignment of the human type I interferon (IFN) precursors and the fusion protein of consensus IFN-αCon1 with human IFN α 14 signal peptide (Infergen w A14 Sig.). All the human type I IFN precursors are naturally occurring and have signal peptides to direct their translocation through the cell membranes for secretion. Infergen is a bio-engineered interferon based on the consensus amino acid sequences of different subtypes of human Interferon α. It is produced in E. coli and does not have a signal peptide. For expression in mammalian cells, the signal peptide of human IFN α14 is attached to the N-terminal of Infergen to direct its secretion. However the signal peptides from other human type I IFNs or even other human or animal proteins could be used for this purpose as well.

[0272] This figure shows the consensus sequence from the alignment as “Majority” sequence and a ruler below the consensus sequence for aligning all of the sequences. The actual amino acid residue numbers for the species are shown at the left hand side of each sequence. Please note that the numbers shown on the ruler are different from actual residue numbers for the species.

[0273] Because there are high sequence homologies among these listed species, the alignment was used to “rationally” design the glycosylation sites in the species based on the position of the naturally occurring glycosylation sites in certain homologous species in the alignment. To uniformly identify the positions of the glycosylation sites in the alignment, the numbering system of the ruler is used in positioning the mutants. The first potential glycosylation site is an N-linked glycosylation site in human IFN α 14 and H at position 31 in ruler. The consensus recognition site of N-linked glycosylation is Asn_X_Ser/Thr with Asn be the residue where carbohydrate chain attaches. In order to create a glycosylation site at position 31 in the ruler for other species, residues at position 31 in the ruler throughout the species will needed to be changed to Asn and the residues at position 33 changed to either Ser or Thr. The site of this glycosylation will all be numbered 31 throughout the species but the actual amino acid residue number will vary from one species to another. The glycosylation site 31 is actually at amino acid number 25 for all of the species in FIG. 1 except IFN κ in which it is number 31. Human IFN α 14 and H also have a naturally occurring glycosylation site at position 102 in the ruler and thus this glycosylation site will be numbered 102 throughout the species. However position 102 is at the actual amino acid number 94 in IFN α2a and IFN α2b; at the actual amino acid number 95 in IFN α 1, 4a, 4b, 5, 6, 7, 8, 10, 13, 14, 16, 17, 21, H, I, J1, IFN β1, IFN ω1 and Infergen with signal peptide; at the actual amino acid 96 in IFN τ and at actual amino acid number 102 in IFN κ. Human IFN β1 and ω1 have a naturally occurring glycosylation site at position 108 in the ruler and thus this glycosylation site will be numbered 108 throughout the species. However position 108 is at the actual amino acid number 100 in IFN α2a and IFN α2b; at actual amino acid number 101 in IFN α1, 4a, 4b, 5, 6, 7, 8, 10, 13, 14, 16, 17, 21, H, I, J1, IFN β1, IFN ω1 and Infergen with signal peptide; at actual amino acid number 107 in IFN κ and at actual amino acid number 102 in IFN τ. Human IFN α 2b has a naturally occurring O-linked glycosylation site at position 138 in the ruler and thus this glycosylation site will be numbered 138 throughout the species. However position 138 is at the actual amino acid number 129 in IFN α2a and IFN α2b, at actual amino acid number 130 in IFN α 1, 4a, 4b, 5, 6, 7, 8, 10, 13, 14, 16, 17, 21, H, I, J1, IFN β1, IFN ω1 and Infergen with signal peptide; at actual amino acid number 137 in IFN K and at actual amino acid number 129 in IFN τ.

[0274] In another aspect, a hyperglycosylated or protease-resistant, hyperglycosylated polypeptide variant of a parent interferon-alpha therapeutic differs from the parent interferon-alpha therapeutic to the extent that the hyperglycosylated or protease-resistant, hyperglycosylated polypeptide variant comprises (1) a carbohydrate moiety covalently attached to a non-native glycosylation site not found in the parent interferon-alpha therapeutic and/or (2) a carbohydrate moiety covalently attached to a native glycosylation site found but not glycosylated in the parent interferon-alpha therapeutic; and comprises at least one mutated protease cleavage site in place of a native protease cleavage site found in the parent IFN-α protein therapeutic.

IFN-β

[0275] The amino acid sequence of any known IFN-β can be modified to generate a subject synthetic Type I interferon receptor polypeptide agonist. The term interferon-beta (“IFN-β”) includes IFN-β polypeptides that are naturally occurring; and non-naturally-occurring IFN-β polypeptides. Suitable beta interferons include, but are not limited to, naturally-occurring IFN-β; IFN-β1a, e.g., Avonex® (Biogen, Inc.), and Rebif® (Serono, S A); IFN-β1b (Betaseron®; Berlex); and the like. Amino acid sequences of IFN-β are publicly available; for example, human IFN-β1 amino acid sequence is found under GenBank Accession No. NP_{—}002167 and is depicted in FIG. 24 (SEQ ID NO:1359). A human IFN-β amino acid sequence is also depicted in FIG. 3.

[0276] Suitable hyperglycosylated or protease-resistant, hyperglycosylated polypeptide variants include hyperglycosylated forms of any parent IFN-β polypeptide. In one aspect, a hyperglycosylated or protease-resistant, hyperglycosylated variant of a parent IFN-β polypeptide has an amino acid sequence that differs from the amino acid sequence of the parent polypeptide to the extent that the variant comprises one or more glycosylation sites not found in the parent polypeptide; and comprises at least one mutated protease cleavage site in place of a native protease cleavage site found in the parent IFN-β polypeptide.

[0277] The numbering of amino acids, discussed in the context of amino acid replacements for generating hyperglycosylation variants of the parent protein therapeutic, coincides with the numbering of amino acids used to depict the Type I interferon amino acid sequences appearing in FIG. 24. In the context of amino acid replacements, for generating protease-resistant variants of the parent protein therapeutic, the numbering of amino acids used to describe IFN-β variants coincides with the numbering of amino acids as depicted in FIG. 24.

[0278] In another aspect, a hyperglycosylated or protease-resistant, hyperglycosylated polypeptide variant of a parent interferon-beta therapeutic differs from the parent interferon-beta therapeutic to the extent that the protease-resistant or protease-resistant, hyperglycosylated polypeptide variant comprises (1) a carbohydrate moiety covalently attached to a non-native glycosylation site not found in the parent interferon-beta therapeutic and/or (2) a carbohydrate moiety covalently attached to a native glycosylation site found but not glycosylated in the parent interferon-beta therapeutic; and comprises at least one mutated protease cleavage site in place of a native protease cleavage site found in the parent IFN-β polypeptide.

[0279] In another aspect, the following non-limiting list of hyperglycosylated variants of IFN-β are described: [L31S]interferon-β (SEQ ID No.:1695), [S102N]interferon-β (SEQ ID No.:1696), [E138T]interferon-β (SEQ ID No.:1698), [L31S, S102N]interferon-β (SEQ ID No.:1699), [L31S, E138T]interferon-β (SEQ ID No.:1701), [S102N, E138T]interferon-β (SEQ ID No.:1703), and [L31S, S102N, E138T]interferon-β (SEQ ID No.:1706).

IFN-tau

[0280] The amino acid sequence of any known IFN-tau can be modified to generate a subject synthetic Type I interferon receptor polypeptide agonist. The term interferon-tau includes IFN-tau polypeptides that are naturally occurring; and non-naturally-occurring IFN-tau polypeptides Suitable tau interferons include, but are not limited to, naturally-occurring IFN-tau; Tauferon® (Pepgen Corp.); and the like. IFN-tau may comprise an amino acid sequence as set forth in any one of GenBank Accession Nos. P115696; P56828; P56832; P56829; P56831; Q29429; Q28595; Q28594; S08072; Q08071; Q08070; Q08053; P56830; P28169; P28172; and P28171. Any hyperglycosylated or protease-resistant, hyperglycosylated IFN-tau polypeptide variant that retains a desired pharmacologic activity of IFN-tau may be used in the methods or compositions of the invention.

[0281] Suitable hyperglycosylated or protease-resistant, hyperglycosylated polypeptide variants include protease-resistant or protease-resistant, hyperglycosylated forms of any parent IFN-tau polypeptide. In one aspect, a hyperglycosylated variant of a parent IFN-tau polypeptide has an amino acid sequence that differs from the amino acid sequence of the parent polypeptide to the extent that the variant comprises one or more glycosylation sites not found in the parent polypeptide. In one aspect, a protease-resistant, hyperglycosylated polypeptide variant of a parent IFN-tau polypeptide has an amino acid sequence that differs from the amino acid sequence of the parent polypeptide to the extent that the variant comprises one or more glycosylation sites not found in the parent polypeptide and at least one mutated protease cleavage site in place of a native protease cleavage site found in a parent IFN-tau polypeptide.

[0282] In another aspect, the following non-limiting list of hyperglycosylated variants of IFN-τ are described: [K31N]interferon τ (SEQ ID No.:1743), [1102N]interferon τ (SEQ ID No.:1744), [E108N]interferon τ (SEQ ID No.:1745), [L138T]interferon τ (SEQ ID No.:1746), [K31N, 1102N]interferon τ (SEQ ID No.:1747), [K31N, E108N]interferon τ (SEQ ID No.:1748), [K31N, L138T]interferon τ (SEQ ID No.:1749), [I102N, E108N]interferon τ (SEQ ID No.:1750), [I102N, L138T]interferon τ (SEQ ID No.:1751), [E108N, L138T]interferon τ (SEQ ID No.:1752), [K31N, I102N, E108N]interferon τ (SEQ ID No.:1753), [K31N, I102N, L138T]interferon τ (SEQ ID No.:1754), [K31N, E108N, L138T]interferon τ (SEQ ID No.:1755), [I102N, E108N, L138T]interferon τ (SEQ ID No.:1756), and [K31N, I102N, E108N, L138T]interferon T (SEQ ID No.:1757).

IFN-ω

[0283] The amino acid sequence of any known IFN-omega can be modified to generate a subject synthetic Type I interferon receptor polypeptide agonist. The term interferon-omega (“IFN-ω”) includes IFN-ω polypeptides that are naturally occurring; and non-naturally-occurring IFN-ω polypeptides. Suitable IFN-β include, but are not limited to, naturally-occurring IFN-ω; recombinant IFN-ω, e.g., Biomed 510 (BioMedicines); and the like. IFN-ω may comprise an amino acid sequence as set forth in GenBank Accession No. NP_{—}002168; or AAA70091.

[0284] Suitable hyperglycosylated or protease-resistant, hyperglycosylated polypeptide variants include protease-resistant or protease-resistant, hyperglycosylated forms of any parent IFN-ω polypeptide. In one aspect, a hyperglycosylated or protease-resistant, hyperglycosylated variant of a parent IFN-ω polypeptide has an amino acid sequence that differs from the amino acid sequence of the parent polypeptide to the extent that the variant comprises one or more glycosylation sites not found in the parent polypeptide; and comprises at least one mutated protease cleavage site in place of a native protease cleavage site found in the parent polypeptide.

[0285] In another aspect, the parent polypeptide is IFN-ω1 and the hyperglycosylated or protease-resistant, hyperglycosylated polypeptide variant is an [R102N]IFN-ω1 glycopeptide, where the [R102N]IFN-ω1 glycopeptide is a variant of IFN-α1 having (a) an asparagine residue substituted for the native arginine residue at amino acid position 102 in the amino acid sequence of IFN-ω1 and (b) a carbohydrate moiety covalently attached to the R-group of said asparagine residue; where the variant comprises at least one mutated protease cleavage site in place of a native protease cleavage iste found in the parent polypeptide.

[0286] In another aspect, the parent polypeptide is IFN-ω1 and the hyperglycosylated or protease-resistant, hyperglycosylated polypeptide variant is an [G138N]IFN-ω1 glycopeptide, where the [G138N]IFN-ω1 glycopeptide is a variant of IFN-ω1 having (a) an asparagine residue substituted for the native glycine residue at amino acid position 138 in the amino acid sequence of IFN-ω1 and (b) a carbohydrate moiety covalently attached to the R-group of said asparagine residue; where the variant comprises at least one mutated protease cleavage site in place of a native protease cleavage site found in the parent polypeptide.

[0287] In another aspect, the parent polypeptide is IFN-ω1 and the hyperglycosylated or protease-resistant, hyperglycosylated polypeptide variant is an [G138T]IFN-ω1 glycopeptide, where the [G138T]IFN-ω1 glycopeptide is a variant of IFN-ω1 having (a) an threonine residue substituted for the native glycine residue at amino acid position 138 in the amino acid sequence of IFN-ω1 and (b) a carbohydrate moiety covalently attached to the R-group of said threonine residue; where the variant comprises at least one mutated protease cleavage site in place of a native protease cleavage site found in the parent polypeptide.

[0288] In another aspect, the parent polypeptide is IFN-ω1 and the hyperglycosylated or protease-resistant, hyperglycosylated polypeptide variant is an [S102N, G138N]IFN-ω1 glycopeptide, where the [S102N, G138N]IFN-ω1 glycopeptide is a variant of IFN-ω1 having (a) asparagine residues substituted for the native serine and glycine residues at amino acid positions 102 and 138, respectively, in the amino acid sequence of IFN-ω1 and (b) a carbohydrate moiety covalently attached to the R-group of each of said asparagine residues; where the variant comprises at least one mutated protease cleavage site in place of a native protease cleavage site found in the parent polypeptide.

[0289] In another aspect, the parent polypeptide is IFN-ω1 and the hyperglycosylated or protease-resistant, hyperglycosylated polypeptide variant is an [S102N, G138T]IFN-ω1 glycopeptide, where the [S102N, G138T]IFN-ω1 glycopeptide is a variant of IFN-ω1 having (a) asparagine and threonine residues substituted for the native serine and glycine residues at amino acid positions 102 and 138, respectively, in the amino acid sequence of IFN-ω1 (as set forth in FIG. 24) and (b) a carbohydrate moiety covalently attached to the R-group of each of said asparagine and threonine residue; where the variant comprises at least one mutated protease cleavage site in place of a native protease cleavage site found in the parent polypeptide.

[0290] In another aspect, several variants of interferon-ω are described. By means of non-limiting example, [D31N]interferon co (SEQ ID No.:1727), [R102N]interferon co (SEQ ID No.:1728), [G138T]interferon co (SEQ ID No.:1730), [D31N, R102N]interferon co (SEQ ID No.:1731), [D31N, G138T]interferon co (SEQ ID No.:1733), [R102N, G138T]interferon co (SEQ ID No.:1735), [D31N, R102N, G138T]interferon Co (SEQ ID No.:1738).

[0291] The numbering of amino acids, discussed in the context of amino acid replacements for generating hyperglycosylation variants of the parent protein therapeutic, coincides with the numbering of amino acids used to depict the Type I interferon amino acid sequences appearing in FIG. 24. In the context of amino acid replacements, for generating protease-resistant variants of the parent protein therapeutic, the numbering of amino acids used to describe IFN-omega variants coincides with the numbering of amino acids as depicted in FIG. 24.

[0292] In another aspect, a hyperglycosylated or protease-resistant, hyperglycosylated polypeptide variant of a parent interferon-omega therapeutic differs from the parent interferon-omega therapeutic to the extent that the hyperglycosylated or protease-resistant, hyperglycosylated polypeptide variant comprises (1) a carbohydrate moiety covalently attached to a non-native glycosylation site not found in the parent interferon-omega therapeutic and/or (2) a carbohydrate moiety covalently attached to a native glycosylation site found but not glycosylated in the parent interferon-omega therapeutic; and comprises at least one mutated protease cleavage site in place of a native protease cleavage site found in the parent polypeptide.

Interferon-Kappa

[0293] The amino acid sequence of any known IFN-kappa can be modified to generate a subject synthetic Type I interferon receptor polypeptide agonist. The term interferon-kappa includes IFN-kappa polypeptides that are naturally occurring; and non-naturally-occurring IFN-kappa polypeptides. Suitable kappa interferons include, but are not limited to, naturally-occurring IFN-kappa and the like. IFN-kappa may comprise an amino acid sequence as set forth in any one of GenBank Accession No. NM_{—}020124. Any hyperglycosylated or protease-resistant, hyperglycosylated IFN-kappa polypeptide variant that retains a desired pharmacologic activity of IFN-kappa may be used in the methods or compositions of the invention.

[0294] Suitable hyperglycosylated or protease-resistant, hyperglycosylated polypeptide variants include protease-resistant or protease-resistant, hyperglycosylated forms of any parent IFN-kappa polypeptide. In one aspect, a hyperglycosylated variant of a parent IFN-kappa polypeptide has an amino acid sequence that differs from the amino acid sequence of the parent polypeptide to the extent that the variant comprises one or more glycosylation sites not found in the parent polypeptide. In one aspect, a protease-resistant, hyperglycosylated polypeptide variant of a parent IFN-kappa polypeptide has an amino acid sequence that differs from the amino acid sequence of the parent polypeptide to the extent that the variant comprises one or more glycosylation sites not found in the parent polypeptide and at least one mutated protease cleavage site in place of a native protease cleavage site found in a parent IFN-kappa polypeptide.

[0295] In another aspect, the following non-limiting list of hyperglycosylated variants of IFN-κ are described: [L31S]interferon κ (SEQ ID No.:1711), [T102N]interferon κ (SEQ ID No.:1712), [K108N]interferon κ (SEQ ID No.:1713), [P138T]interferon κ (SEQ ID No.:1714), [L31S, T102N]interferon κ (SEQ ID No.:1715), [L31S, K108N]interferon κ (SEQ ID No.:1716), [L31S, P138T]interferon κ (SEQ ID No.:1717), [T102N, K108N]interferon κ (SEQ ID No.:1718), [T102N, P138T]interferon κ (SEQ ID No.:1719), [K108N, P138T]interferon κ (SEQ ID No.:1720), [L31S, T102N, K108N]interferon κ (SEQ ID No.:1721), [L31S, T102N, P138T]interferon κ (SEQ ID No.:1722), [L31S, K108N, P138T]interferon κ (SEQ ID No.:1723), [T102N, K108N, P138T]interferon κ (SEQ ID No.:1724), and [L31S, T102N, K108N, P138T]interferon κ (SEQ ID No.:1725).

Interferon-Gamma

[0296] The nucleic acid sequences encoding IFN-γ polypeptides may be accessed from public databases, e.g., GenBank, journal publications, and the like. While various mammalian IFN-gamma polypeptides are of interest, for the treatment of human disease, generally the human protein will be used. Human IFN-gamma coding sequence may be found in Genbank, accession numbers X13274; V00543; and NM_{—}000619. The corresponding genomic sequence may be found in Genbank, accession numbers J00219; M37265; and V00536. See, for example. Gray et al. (1982) Nature 295:501 (Genbank X13274); and Rinderknecht et al. (1984) J.B.C. 259:6790. In some embodiments, the IFN-γ is glycosylated.

[0297] IFN-γ1b (Actimmune®; human interferon) is a single-chain polypeptide of 140 amino acids. It is made recombinantly in E. coli and is unglycosylated (Rinderknecht et al. 1984, J. Biol. Chem. 259:6790-6797). Recombinant IFN-gamma as discussed in U.S. Pat. No. 6,497,871 is also suitable for use herein.

[0298] The term “IFN-gamma” includes any of natural IFN-gamma, recombinant IFN-gamma and the derivatives thereof so far as they have an IFN-γ activity, particularly human IFN-gamma activity. Human IFN-gamma exhibits the antiviral and anti-proliferative properties characteristic of the interferons, as well as a number of other immunomodulatory activities, as is known in the art. Although IFN-gamma is based on the sequences as provided above, the production of the protein and proteolytic processing can result in processing variants thereof. The unprocessed sequence provided by Gray et al., supra, consists of 166 amino acids (aa). Although the recombinant IFN-gamma produced in E. coli was originally believed to be 146 amino acids, (commencing at amino acid 20) it was subsequently found that native human IFN-gamma is cleaved after residue 23, to produce a 143 aa protein, or 144 aa if the terminal methionine is present, as required for expression in bacteria. During purification, the mature protein can additionally be cleaved at the C terminus after reside 162 (referring to the Gray et al. sequence), resulting in a protein of 139 amino acids, or 140 amino acids if the initial methionine is present, e.g. if required for bacterial expression. The N-terminal methionine is an artifact encoded by the mRNA translational “start” signal AUG that, in the particular case of E. coli expression is not processed away. In other microbial systems or eukaryotic expression systems, methionine may be removed.

[0299] Any of the native IFN-gamma peptides, modifications and variants thereof, or a combination of one or more peptides can serve as a parent polypeptide referent in connection with the present methods and/or compositions. IFN-gamma peptides of interest include fragments, and can be variously truncated at the carboxyl terminus relative to the full sequence. Such fragments continue to exhibit the characteristic properties of human gamma interferon, so long as amino acids 24 to about 149 (numbering from the residues of the unprocessed polypeptide) are present. Extraneous sequences can be substituted for the amino acid sequence following amino acid 155 without loss of activity. See, for example, U.S. Pat. No. 5,690,925. Native IFN-gamma moieties include molecules variously extending from amino acid residues 24-150; 24-151, 24-152; 24-153, 24-155; and 24-157.

[0300] Any hyperglycosylated or protease-resistant, hyperglycosylated IFN-gamma polypeptide variant that retains a desired pharmacologic activity of a parent IFN-gamma polypeptide may be used in the methods and/or compositions of the invention.

[0301] In another aspect, a hyperglycosylated or protease-resistant, hyperglycosylated polypeptide variant of a parent interferon-gamma therapeutic differs from the parent interferon-gamma therapeutic to the extent that the hyperglycosylated or protease-resistant, hyperglycosylated polypeptide variant comprises (1) a carbohydrate moiety covalently attached to a non-native glycosylation site not found in the parent interferon-gamma therapeutic and/or (2) a carbohydrate moiety covalently attached to a native glycosylation site found but not glycosylated in the parent interferon-gamma therapeutic; and comprises at least one mutated protease cleavage site in place of a native protease cleavage site found in the parent IFN-γ polypeptide.

[0302] In another aspect, the parent protein therapeutic is interferon gamma-1b and the hyperglycosylated or protease-resistant, hyperglycosylated polypeptide variant of the parent interferon gamma-1b therapeutic is a protease-resistant variant of glycosylated native (wild-type) human IFN-γ. Glycosylated native (wild-type) human IFN-γ is described in WO 02/081507.

Erythropoietin

[0303] In some embodiments, a hyperglycosylated or protease-resistant, hyperglycosylated polypeptide variant comprises an erythropoietin amino acid sequence comprising at least one non-native glycosylation site compared to a parent erythropoietin polypeptide; and comprises at least one mutated protease cleavage site in place of a native protease cleavage site found in the parent EPO polypeptide. Suitable erythropoietin polypeptides include those proteins that have the biological activity of human erythropoietin such as erythropoietin analogs; erythropoietin isoforms; erythropoietin fragments; hybrid erythropoietin proteins; fusion proteins; and oligomers and multimers of any of the foregoing.

[0304] Specific examples of erythropoietin include, but are not limited to, human erythropoietin (see, e.g., Jacobs et al. (1985) Nature 313:806-810; and Lin et al. (1985) Proc Natl Acad Sci USA 82:7580-7584); erythropoietin polypeptides discussed in U.S. Pat. Nos. 6,696,056 and 6,585,398; the amino acid sequences provided in GenBank Accession Nos. NP_{—}00790 and CAA26095; Epoetin alfa (EPREX®; ERYPO®); Novel erythropoiesis stimulating protein (NESP) (a hyperglycosylated analog of recombinant human eryhropoietin (Epoetin) described in European patent application EP640619); human erythropoietin analog—human serum albumin fusion proteins described in International patent application WO10266054; erythropoietin mutants described in International patent application WO10238890; erythropoietin omega, which may be produced from an Apa I restriction fragment of the human erythropoietin gene described in U.S. Pat. No. 5,688,679; altered glycosylated human erythropoietin described in International patent application WO 10211781; PEG conjugated erythropoietin analogs described in WO9805363 or U.S. Pat. No. 5,643,575. Specific examples of cell lines modified for expression of endogenous human erythropoietin are described in international patent applications WO10205268 and WO9412650.

[0305] In one aspect, a hyperglycosylated or protease-resistant, hyperglycosylated variant of a parent erythropoietin polypeptide retains the hematopoietic activity of the parent erythropoietin as determined by monitoring and measurement of the patient's hematocrit.

[0306] In another aspect, the parent polypeptide is EPOGEN® epoetin alfa and the hyperglycosylated or protease-resistant, hyperglycosylated polypeptide variant is a protease-resistant variant of ARANESP® darbepoetin alfa.

Insulin

[0307] In some embodiments, a hyperglycosylated or protease-resistant, hyperglycosylated polypeptide variant comprises an insulin amino acid sequence comprising at least one non-native glycosylation site compared to a parent insulin polypeptide; and comprises at least one mutated protease cleavage site in place of a native protease cleavage site found in the parent insulin polypeptide. Suitable insulin polypeptides include, but are not limited to, proinsulin, preproinsulin, and the insulin forms disclosed in U.S. Pat. Nos. 4,1022,417; 4,1022,418; 5,474,978; 5,514,646; 5,504,188; 5,547,929; 5,650,486; 5,693,609; 5,700,662; 5,747,642; 5,922,675; 5,952,297; 6,034,054; and 6,211,144; and published PCT applications WO 00/121197; WO 09/010,645; and WO 90/12814. Insulin analogs include, but are not limited to, superactive insulin analogs, monomeric insulins, and hepatospecific insulin analogs. Various forms of insulin include Humalog®; Humalog® Mix 50/50™; Humalog® Mix 75/25™; Humulin® 50/50; Humulin® 70/30; Humulin® L; Humulin® N; Humulin® R; Humulin® Ultralente; Lantus®; Lente® Iletin® II; Lente® Insulin; Lente® L; Novolin® 70/30; Novolin® L; Novolin® N; Novolin® R; NovoLog™; NPH Iletin® I; NPH-N; Pork NPH Ileting II; Pork Regular Iletin® II; Regular (Concentrated) Iletin® II U-500; Regular Iletin® I; and Velosulin® BR Human (Buffered).

[0308] Insulin polypeptides suitable for modification and use according to the present invention include analogs of human insulin wherein position B28 is Asp, Lys, Leu, Val or Ala and position B29 is Lys or Pro; des(B28-B30) human insulin; des(B27) human insulin; des(B30) human insulin; an analog of human insulin in which position B28 is Asp and position B29 is Lys or Pro; an analog of human insulin in which position B28 is Lys, and position B29 is Lys or Pro; Asp^{B28} human insulin; Lys^{B28} Pro^{B29} human insulin; B29-N^{ε}-myristoyl-des(B30) human insulin; B29-N^{ε}-palmitoyl-des(B30) human insulin; B29-N-myristoyl human insulin; B29-N^{ε}-palmitoyl human insulin; B28-N^{ε}-myristoyl Lys^{B28} Pro^{B29} human insulin; B28-N^{ε}-palmitoyl Lyw^{B28} Pro^{B29} human insulin; B30-N^{ε}-myristoyl Thr^{B29} Lys^{B30} human insulin; B30-N^{ε}-palmitoyl-Thr^{B29} Lys^{B30} human insulin; B29-N^{ε}-(N-palmitoyl-γ-glutamyl)-des(B30) human insulin; B29-N^{ε}-(N-lithocholyl-γ-glutamyl)-des(B30) human insulin; B29-N′-(ω-carboxyheptadecanoyl)-des(B30) human insulin; and B29-N′-(ω-carboxyheptadecanoyl) human insulin.

[0309] The amino acid sequences of various insulin polypeptides are publicly available in, e.g., public databases such as GenBank, journal articles, patents and published patent applications, and the like. For example, the amino acid sequences of human insulin are found in GenBank under the following accession numbers: CAA00714; CAA00713; CAA00712; CAA01254; 1HISA and 1HISB; 1 HIQA and 1 HIQB; 1HITA and 1HITB; 1 HLSA and 1HLSB; 1VKTA and 1VKTB.

[0310] In addition, insulin derivatives and protease-resistant or protease-resistant, hyperglycosylated forms thereof can be used as parent polypeptides and hyperglycosylated or protease-resistant, hyperglycosylated polypeptide variants, respectively, in methods and/or compositions of the present invention. Insulin derivatives, include, but not are limited to, acylated insulin, glycosylated insulin, and the like. Examples of acylated insulin include those disclosed in U.S. Pat. No. 5,922,675, e.g., insulin derivatized with a C₆-C₂₁ fatty acid (e.g., myristic, pentadecylic, palmitic, heptadecylic, or stearic acid) at an α- or ε-amino acid of glycine, phenylalanine, or lysine.

Antibodies

[0311] In some embodiments, a hyperglycosylated or protease-resistant, hyperglycosylated polypeptide variant comprises an antibody polypeptide amino acid sequence, and further comprises at least one non-native glycosylation site compared to a parent antibody polypeptide; and further comprises at least one mutated protease cleavage site in place of a native protease cleavage site found in the parent polypeptide. Suitable antibodies include, but are not limited to, antibodies of various isotypes (e.g., IgG1, IgG3 and IgG4); monoclonal antibodies produced by any means; humanized antibodies; chimeric antibodies; single-chain antibodies; antibody fragments such as Fv, F(ab′)₂, Fab′, Fab, Facb, and the like; and the like, provided that the antibody is capable of binding to antigen. Suitable monoclonal antibodies include antibodies that are specific for a cell surface receptor and that function as antagonists to the receptor, including, but not limited to, antibody to TGF-β receptor, antibody to TNF-α receptor, antibody to VEGF receptor (see, e.g., U.S. Pat. Nos. 6,617,160, 6,448,077, and 6,365,157), antibody to epidermal growth factor receptor, and the like; antibodies specific for receptor ligands, including, but not limited to, antibody to TGF-β, antibody to TNF-α, antibody to VEGF, and the like; antibody specific for a tumor-associated antigen; antibody specific for CD20; antibody specific for epidermal growth factor receptor-2; antibody specific for the receptor binding domain of IgE; antibody specific for adhesion molecules (e.g., antibody specific for α subunit (CD11a) of LFA-1; antibody specific for α4β7; etc.); and the like.

Blood Factors

[0312] In some embodiments, a hyperglycosylated or protease-resistant, hyperglycosylated polypeptide variant comprises a blood factor polypeptide amino acid sequence, and further comprises at least one non-native glycosylation site compared to a parent blood factor polypeptide; and comprises at least one mutated protease cleavage site in place of a native protease cleavage site found in a parent polypeptide. Suitable blood factor polypeptides include, but are not limited to, a tissue plasminogen activator (TPA); Factor VIIa; Factor VIII; Factor IX; β-globin; hemoglobin; and the like. The amino acid sequences of various blood factors are publicly available, e.g., in public databases such as GenBank; journal articles; patents and published patent applications; and the like. For example, the amino acid sequences of human TPA are found under GenBank Accession Nos. P0070, NP_{—}127509, and NP-000921; the amino acid sequence of a human Factor VIIa is found under GenBank Accession No. KFHU7; the amino acid sequence of a human Factor IX is found under GenBank Accession Nos. P00740 and NP_{—}000124; the amino acid sequence of a human Factor VIII is found under GenBank Accession Nos. AAH64380, AAH22513, and P00451.

[0313] In one aspect, the parent polypeptide is ACTIVASE® alteplase and the protease-resistant, polypeptide variant is a protease-resistant variant of TNKase™ tenecteplase.

Colony Stimulating Factors

[0314] In some embodiments, a hyperglycosylated or protease-resistant, hyperglycosylated polypeptide variant comprises a colony stimulating factor polypeptide amino acid sequence, and further comprises at least one non-native glycosylation site compared to a parent colony stimulating factor polypeptide; and comprises at least one mutated protease cleavage site in place of a native protease cleavage site found in the parent polypeptide. Suitable colony stimulating factor polypeptides include, but are not limited to, granulocyte colony stimulating factor (G-CSF), such as NEUPOGEN® filgrastim and NEULASTA™ pegfilgrastim, granulocyte-monocyte colony stimulating factor (GM-CSF), such as LEUKINE® sargramostim, macrophage colony stimulating factor, megakaryocyte colony stimulating factor; IL-3; stem cell factor (SCF); and the like.

[0315] The amino acid sequences of various blood factors are publicly available, e.g., in public databases such as GenBank; journal articles; patents and published patent applications; and the like. For example, amino acid sequences of IL-3 are disclosed in U.S. Pat. Nos. 4,877,729 and 4,959,455, and International Patent Publication No. WO 88/00598; amino acid sequences of human G-CSF are disclosed in U.S. Pat. No. 4,810,643; WO 91/02754 and WO 92/04455 disclose the amino acid sequence of fusion proteins comprising IL-3; WO 95/21197, WO 95/21254, and U.S. Pat. No. 6,730,303 disclose fusion proteins capable of broad multi-functional hematopoietic properties; amino acid sequences of human G-CSF are found under GenBank Accession Nos. NP_{—}757374, P010219, FQHUGL, and NP_{—}000750; amino acid sequences of human GM-CSF are found under GenBank Accession Nos. NP_{—}000749 and P04141; amino acid sequences of IL-3 are found under GenBank Accession Nos. AAH66272, AAH66273, and AAH66276; etc.

Growth Hormones

[0316] In some embodiments, a hyperglycosylated or protease-resistant, hyperglycosylated polypeptide variant comprises a growth hormone polypeptide amino acid sequence, and further comprises at least one non-native glycosylation site compared to a parent growth hormone polypeptide; and comprises at least one mutated protease cleavage site in place of a native protease cleavage site found in the parent polypeptide. Suitable growth hormone polypeptides include, but are not limited to, somatotropin; a human growth hormone; any of the growth hormone variants disclosed in U.S. Pat. Nos. 6,143,523, 6,136,563, 6,022,711, and 5,688,666; fusion proteins comprising a growth hormone, e.g., as disclosed in U.S. Pat. No. 5,889,144; growth hormone fragments that retain growth hormone activity; a growth hormone receptor polypeptide agonist as disclosed in U.S. Pat. No. 6,387,879; and the like. Growth hormones include alternative forms of known growth hormones, e.g., alternative forms of human growth hormone (hGH), including naturally-occurring derivatives, variants and metabolic products, degradation products primarily of biosynthetic hGH and engineered variants of hGH produced by recombinant methods (see, e.g., U.S. Pat. No. 6,348,444).

Growth Factors

[0317] In some embodiments, a hyperglycosylated or protease-resistant, hyperglycosylated polypeptide variant comprises a growth factor amino acid sequence comprising at least one non-native glycosylation site compared to a parent growth hormone polypeptide; and comprises at least one mutated protease cleavage site in place of a native protease cleavage site found in the parent polypeptide. Suitable growth factor polypeptides include, but are not limited to, keratinocyte growth factor; an acidic fibroblast growth factor, a stem cell factor, a basic fibroblast growth factor, a hepatocyte growth factor, an insulin-like growth factor, etc.; active fragments of a growth factor; fusion proteins comprising a growth factor; and the like. The amino acid sequences of various growth factors are publicly available, e.g., in public databases such as GenBank; journal articles; patents and published patent applications; and the like. For example, amino acid sequences of bFGF are found under GenBank Accession Nos. AAB20640, AAA57275, A43498, and AAB20639; amino acid sequences of aFGF are found under GenBank Accession Nos. AAB29059, CAA46661, and 1605206A; amino acid sequences of stem cell factor are found under GenBank Accession Nos. AAH69733, AAH69783, and AAH69797; amino acid sequences of keratinocyte growth factor are found under GenBank Accession Nos. 035565, AAL05875, and P21781; amino acid sequences of hepatocye growth factor are found under GenBank Accession Nos. AAA64239, AAB20169, and CAA40802.

Soluble Receptors

[0318] In some embodiments, a hyperglycosylated or protease-resistant, hyperglycosylated polypeptide variant comprises a soluble receptor polypeptide amino acid sequence, and further comprises at least one non-native glycosylation site compared to a parent soluble receptor polypeptide; and comprises at least one mutated protease cleavage site in place of a native protease cleavage site found in the parent polypeptide. Suitable soluble receptor polypeptides include, but are not limited to, a TNF-α-binding soluble receptor; a soluble VEGF receptor; a soluble interleukin receptor; a soluble IL-1 receptor; a soluble type II IL-1 receptor; a soluble γ/δ T cell receptor; ligand-binding fragments of a soluble receptor; and the like. Suitable soluble receptors bind a ligand that, under normal physiological conditions, binds to and activates the corresponding membrane-bound or cell surface receptor. Thus, a suitable soluble receptor is one that functions as a receptor antagonist, by binding the ligand that would ordinarily bind the receptor in its native (e.g., membrane-bound) form.

[0319] The amino acid sequences of various soluble receptors are publicly available, e.g., in public databases such as GenBank; journal articles; patents and published patent applications; and the like. For example, amino acid sequences of soluble VEGF receptors are found under GenBank Accession Nos. AAC50060 and NP_{—}002010; soluble VEGF receptors are described in U.S. Pat. Nos. 6,383,486, 6,375,929, and 6,100,071; soluble IL-4 receptors are described in U.S. Pat. No. 5,5102,905; soluble IL-1 receptors are described in U.S. Patent Publication No. 20040023869; etc.

Chemokines

[0320] In some embodiments, a hyperglycosylated or protease-resistant, hyperglycosylated polypeptide variant comprises a chemokine polypeptide amino acid sequence, and further comprises at least one non-native glycosylation site compared to a parent chemokine polypeptide; and further comprises at least one mutated protease cleavage site in place of a native protease cleavage site found in the parent polypeptide. Suitable chemokine polypeptides include, but are not limited to, IP-10; Mig; Groα/IL-8, RANTES; MIP-1α; MIP-1; MCP-1; PF-4; and the like; as well as fusion proteins comprising a chemokine. The amino acid sequences of various chemokines are publicly available, e.g., in public databases such as GenBank; journal articles; patents and published patent applications; and the like. For example, amino acid sequences of IP-10 are disclosed in U.S. Pat. Nos. 6,491,906, 5,935,567, 6,153,600, 5,728,377, and 5,1024,292; amino acid sequences of Mig are disclosed in U.S. Pat. No. 6,491,906, and Farber (11023) Biochemical and Biophysical Research Communications 192(1):223-230; amino acid sequences of RANTES are disclosed in U.S. Pat. Nos. 6,709,649, 6,168,784, and 5,965,697; etc.

Angiogenic Agents

[0321] In some embodiments, a hyperglycosylated or protease-resistant, hyperglycosylated polypeptide variant comprises an angiogenic polypeptide amino acid sequence, and further comprises at least one non-native glycosylation site compared to a parent angiogenic polypeptide; and comprises at least one mutated protease cleavage site in place of a native protease cleavage site found in the parent polypeptide. Suitable angiogenic polypeptides include, but are not limited to, VEGF polypeptides, including VEGF₁₂₁, VEGF₁₆₅, VEGF-C, VEGF-2, etc.; transforming growth factor-beta; basic fibroblast growth factor; glioma-derived growth factor; angiogenin; angiogenin-2; and the like. The amino acid sequences of various angiogenic agents are publicly available, e.g., in public databases such as GenBank; journal articles; patents and published patent applications; and the like. For example, amino acid sequences of VEGF polypeptides are disclosed in U.S. Pat. Nos. 5,194,596, 5,332,671, 5,240,848, 6,475,796, 6,485,942, and 6,057,428; amino acid sequences of VEGF-2 polypeptides are disclosed in U.S. Pat. Nos. 5,726,152 and 6,608,182; amino acid sequences of glioma-derived growth factors having angiogenic activity are disclosed in U.S. Pat. Nos. 5,338,840 and 5,532,343; amino acid sequences of angiogenin are found under GenBank Accession Nos. AAA72611, AAA51678, AAA02369, AAL67710, AAL67711, AAL67712, AAL67713, and AAL67714; etc.

Neuroactive Peptides

[0322] In some embodiments, a hyperglycosylated or protease-resistant, hyperglycosylated polypeptide variant comprises a neuroactive polypeptide amino acid sequence, and further comprises at least one non-native glycosylation site compared to a parent neuroactive polypeptide; and comprises at least one mutated protease cleavage site in place of a native protease cleavage site found in the parent polypeptide. Suitable neuroactive polypeptides include, but are not limited to, nerve growth factor, bradykinin, cholecystokinin, gastin, secretin, oxytocin, gonadotropin-releasing hormone, beta-endorphin, enkephalin, substance P, somatostatin, prolactin, galanin, growth hormone-releasing hormone, bombesin, dynorphin, neurotensin, motilin, thyrotropin, neuropeptide Y, luteinizing hormone, calcitonin, insulin, glucagons, vasopressin, angiotensin II, thyrotropin-releasing hormone, vasoactive intestinal peptide, a sleep peptide, etc.

Additional Proteins

[0323] In its broadest sense, the compositions and methods of the invention contemplate the use of any hyperglycosylated or protease-resistant, hyperglycosylated polypeptide variant that comprises an amino acid sequence derived from a parent polypeptide of pharmacologic interest; and that further comprises at least one non-native glycosylation site compared to the parent polypeptide; and that further comprises at least one mutated protease cleavage site in place of a native protease cleavage site found in the parent polypeptide. Other proteins of pharmacologic interest include, but are not limited to, a thrombolytic agent, an atrial natriuretic peptide, bone morphogenic protein, thrombopoietin, glial fibrillary acidic protein, follicle stimulating hormone, a human alpha-1 antitrypsin, a leukemia inhibitory factor, a transforming growth factor, an insulin-like growth factor, a luteinizing hormone, a macrophage activating factor, tumor necrosis factor, a neutrophil chemotactic factor, a nerve growth factor a tissue inhibitor of metalloproteinases; a vasoactive intestinal peptide, angiotropin, fibrin; hirudin; a leukemia inhibitory factor; and the like. The amino acid sequences of various therapeutic proteins are publicly available, e.g., in public databases such as GenBank; journal articles; patents and published patent applications; and the like. For example, amino acid sequences of tissue plasminogen activator are found under GenBank Accession Nos. P00750, AAA01895, AAA01378, AAB06956, and CAA00642.

[0324] In some embodiments, a hyperglycosylated or protease-resistant, hyperglycosylated polypeptide variant comprises a relaxin amino acid sequence, and further comprises at least one non-native glycosylation site compared to a parent relaxin polypeptide; and further comprises at least one mutated protease cleavage site in place of a native protease cleavage site found in the parent polypeptide. The relaxin polypeptide can be a naturally-occurring relaxin or a synthetic relaxin. Naturally occurring biologically active relaxin may be derived from human, murine (i.e., rat or mouse), porcine, or other mammalian sources. The term “relaxin” encompasses human H1 preprorelaxin, prorelaxin, and relaxin; H2 preprorelaxin, prorelaxin, and relaxin; recombinant human relaxin (rhRLX); and H3 preprorelaxin, prorelaxin, and relaxin. H3 relaxin has been described in the art. See, e.g., Sudo et al. (2003) J Biol. Chem. 7; 278(10):7855-62. The amino acid sequences of human relaxin are described in the art. For example, human relaxin amino acid sequences are found under the following GenBank Accession Nos.: Q3WXF3, human H3 prorelaxin; P04808, human H1 prorelaxin; NP_{—}604390 and NP_{—}005050, human H2 prorelaxin; AAH05956, human relaxin 1 preproprotein; NP_{—}008842, human H1 preprorelaxin; etc. The relaxin polypeptide can be a relaxin polypeptide comprising A and B chains having N- and/or C-terminal truncations. For example, in H2 relaxin, the A chain can be varied from A(1-24) to A(10-24) and B chain from B(⁻1-33) to B(10-22); and in H1 relaxin, the A chain can be varied from A(1-24) to A(10-24) and B chain from B(1-32) to B(10-22). Also suitable for modification is a relaxin analog having an amino acid sequence which differs from a wild-type (e.g., naturally-occurring) sequence, including, but not limited to, relaxin analogs disclosed in U.S. Pat. No. 5,811,395, and U.S. Pat. No. 6,200,953. Other suitable relaxins and relaxin formulations are found in U.S. Pat. No. 5,945,402. Other possible relaxin polypeptides include relaxin having a replacement of one or more of the natural amino-acids in the B and/or A chains with a different amino acid (including the D-form of a natural amino-acid), including, but not limited to, replacement of the Met moiety at B24 with norleucine (Nle), valine (Val), alanine (Ala), glycine (Gly), serine (Ser), or homoserine (HomoSer). Other possible relaxin polypeptides include relaxin having an amino acid substitutions at the B/C and C/A junctions of prorelaxin, which modifications facilitate cleavage of the C chain from prorelaxin; and variant relaxin comprising a non-naturally occurring C peptide, e.g., as described in U.S. Pat. No. 5,759,807.

Protease-Resistant or Protease-Resistant, Hyperglycosylated Polypeptide Variants of Parent Cytokine Polypeptides

[0325] In some embodiments, a hyperglycosylated or protease-resistant, hyperglycosylated polypeptide variant is a variant of a parent protein therapeutic, and the parent protein therapeutic is a cytokine. In some embodiments, a hyperglycosylated or protease-resistant, hyperglycosylated polypeptide variant comprises one or more of the amino acid replacements, compared to an unmodified parent cytokine, as set forth in an amino acid sequence as depicted in any one of SEQ ID NOs:2-181 (IFN-α2b variants), 233-289 (IFN-β variants), 290-311 (IFN-γ variants), 362-400 (GM-CSF variants), 631-662 (G-CSF variants), 850-895 (hGH variants), 940-977 (EPO variants), 978-988 (IFN-α variants), and 989-1302 (IFN-β variants); and further comprises an amino acid sequence that differs from the amino acid sequence of the parent polypeptide to the extent that the variant comprises one or more glycosylation sites not found in the parent polypeptide. Exemplary amino acid replacements that generate hyperglycosylation are depicted in FIGS. 23-30. In some embodiments, a hyperglycosylated or protease-resistant, hyperglycosylated polypeptide variant is a structural homolog of a protein comprising an amino acid sequence as set forth in any one of SEQ ID NOs:2-181 (IFN-α2b variants), 233-289 (IFN-β variants), 290-311 (IFN-γ variants), 362-400 (GM-CSF variants), 631-662 (G-CSF variants), 850-895 (hGH variants), 940-977 (EPO variants), 978-988 (IFN-α variants), and 989-1302 (IFN-β variants); and further comprises an amino acid sequence that differs from the amino acid sequence of the parent polypeptide to the extent that the variant comprises one or more glycosylation sites not found in the parent polypeptide.

[0326] In some embodiments, a hyperglycosylated or protease-resistant, hyperglycosylated polypeptide variant comprises one or more of the amino acid replacements, compared to an unmodified parent cytokine, as set forth in an amino acid sequence as set forth in any one of SEQ ID NOs:87, 89, 90, 93, 96, 101, 103, 107, 124, 979, 980, 983, 984, 986, and 987; and further comprises an amino acid sequence that differs from the amino acid sequence of the parent polypeptide to the extent that the variant comprises one or more glycosylation sites not found in the parent polypeptide.

[0327] In some embodiments, a hyperglycosylated or protease-resistant, hyperglycosylated polypeptide variant is a cytokine modified on the basis of 3-dimensional structural homology with any one of SEQ ID NOs:87, 89, 90, 93, 96, 101, 103, 107, 124, 979, 980, 983, 984, 986, and 987; where the variant further comprises an amino acid sequence that differs from the amino acid sequence of the parent polypeptide to the extent that the variant comprises one or more glycosylation sites not found in the parent polypeptide.

[0328] In some embodiments, the hyperglycosylated or protease-resistant, hyperglycosylated cytokine variant is selected from protease-resistant or protease-resistant, hyperglycosylated variants of: interleukin-10 (IL-10), interferon beta (IFNβ), interferon alpha-2a (IFN-α2a), interferon alpha-2b (IFN-α2b), interferon gamma (IFN-γ), granulocyte colony stimulating factor (G-CSF), leukemia inhibitory factor (LIF), human growth hormone (hGH), ciliary neurotrophic factor (CNTF), leptin, oncostatin M, interleukin-6 (IL-6), interleukin-12 (IL-12), erythropoietin (EPO), granulocyte-macrophage colony stimulating factor (GM-CSF), interleukin-2 (IL-2), interleukin-3 (IL-3), interleukin-4 (IL-4), interleukin-5 (IL-5), interleukin-13 (IL-13), Flt3 ligand and stem cell factor (SCF). In particular embodiments, the hyperglycosylated or protease-resistant, hyperglycosylated cytokine variant is selected from protease-resistant or protease-resistant, hyperglycosylated variants of IFNβ, IFN-α2α, IFN-α2b, IFN-γ, G-CSF, hGH, EPO, and GM-CSF. In particular embodiments, the known protease-resistant cytokine variant is an interferon.

[0329] The hyperglycosylated or protease-resistant, hyperglycosylated cytokine variant of a parent cytokine exhibits increased resistance to proteolysis compared to the unmodified (parent) cytokine. In some embodiments, the hyperglycosylated or protease-resistant, hyperglycosylated cytokine variant is an interferon variant. In some embodiments, the hyperglycosylated or protease-resistant, hyperglycosylated cytokine variant is an IFN-α2a variant. In some embodiments, the hyperglycosylated or protease-resistant, hyperglycosylated cytokine variant is an IFN-α2b variant. In some embodiments, the hyperglycosylated or protease-resistant, hyperglycosylated cytokine variant is an IFN-β variant. In some embodiments, the hyperglycosylated or protease-resistant, hyperglycosylated cytokine variant is an IFN-γ variant. In some embodiments, the hyperglycosylated or protease-resistant, hyperglycosylated cytokine variant is a variant of a consensus interferon comprising the amino acid sequence identified as SEQ ID NO:232, or as shown in FIG. 9, or as depicted in FIG. 24.

IFN-α Polypeptide Variants

[0330] In some embodiments, a hyperglycosylated or protease-resistant, hyperglycosylated polypeptide variant comprises one or more of the mutations shown in Table 1, below, where the amino acid numbering coincides with the amino acid numbering set forth in FIG. 1; and further comprises an amino acid sequence that differs from the amino acid sequence of the parent polypeptide to the extent that the variant comprises one or more glycosylation sites not found in the parent polypeptide.

TABLE 1

| IFN-α LEAD | SEQ ID N^{o} | Mutation(s) |
|---|---|---|
| 1 | 983 | K121Q/P109A |
| 2 | 987 | E159H/Y89H |
| 3 | 124 | E159Q |
| 4 | 90 | E58H |
| 5 | 89 | E58Q |
| 6 | 979 | E41H/Y89H/N45D |
| 7 | 103 | L117I |
| 8 | 986 | R125H/M111V |
| 9 | 96 | E107H |
| 10 | 101 | E113H |
| 11 | 87 | E41Q |
| 12 | 107 | R125Q |
| 13 | 985 | L117V/A139G |
| 14 | 980 | E41Q/D94G |
| 15 | 93 | E78H |
| 16 | 984 | K133Q/K121Q/P109A/G102R |

[0331] In one aspect, the parent polypeptide is IFN-α2a or IFN-α2b and the hyperglycosylated or protease-resistant, hyperglycosylated polypeptide variant comprises one or more single amino acid replacements of the IFN-α2a amino acid sequence depicted in FIG. 1 or of the IFN-α2b amino acid sequence depicted in Figure 2, corresponding to the replacement of: L by V at position 3; L by I at position 3; P by S at position 4; P by A at position 4; R by H at position 12; R by Q at position 12; R by H at position 13; R by Q at position 13; M by V at position 16; M by I at position 16; R by H at position 22; R by Q at position 22; R or K by H at position 23; R or K by Q at position 23; F by I at position 27; F by V at position 27; L by V at position 30; L by I at position 30; K by Q at position 31; K by T at position 31; R by H at position 33; R by Q at position 33; E by Q at position 41; E by H at position 41; K by Q at position 49; K by by T at position 49; E by Q at position 58; E by H at position 58; K by Q at position 70; K by T at position 70; E by Q at position 78; E by H at position 78; K by Q at position 83; K by T at position 83; Y by H at position 89; Y by I at position 89; E by Q at position 96; E by H at position 96; E by Q at position 107; E by H at position 107; P by S at position 109; P by A at position 109; L by V at position 110; L by I at position 110; M by V at position 111; M by I at position 111; E by Q at position 113; E by H at position 113; L by V at position 117; L by I at position 117; R by H at position 120; R by Q at position 120; K by Q at position 121; K by T at position 121; R by H at position 125; R by Q at position 125; L by V at position 128; L by I at position 128; K by Q at position 131; K by T at position 131; E by Q at position 132; E by H at position 132; K by Q at position 133; K by T at position 133; K by Q at position 138; K by T at position 138; Y by H at position 135; Y by I at position 135; P by S at position 137; P by A at position 137; M by V at position 148; M by I at position 148; R by H at position 149; R by Q at position 149; E by Q at position 159; E by H at position 159; L by V at position 161; L by I at position 161; R by H at position 162; R by Q at position 162; K by Q at position 164; K by T at position 164; E by Q at position 165; and E by H at position 165, wherein residue 1 corresponds to residue 1 of the mature IFN-α2a protein as depicted in FIG. 1 or wherein residue 1 corresponds to residue 1 of the mature IFN-α2b protein as depicted in FIG. 2; and further comprises an amino acid sequence that differs from the amino acid sequence of the parent polypeptide to the extent that the variant comprises one or more glycosylation sites not found in the parent polypeptide.

[0332] In another aspect, the parent polypeptide is IFN-α2a or IFN-α2b, and the hyperglycosylated or protease-resistant, hyperglycosylated polypeptide variant comprises one or more single amino acid replacements of the IFN-α2a amino acid sequence depicted in FIG. 1 or of the IFN-α2b amino acid sequence depicted in FIG. 2, corresponding to: F by V at position 27; R by H at position 33; E by Q at position 41; E by H at position 41; E by Q at position 58; E by H at position 58; E by Q at position 78; E by H at position 78; Y by H at position 89; E by Q at position 107; E by H at position 107; P by A at position 109: L by V at position 110; M by V at position 111; E by Q at position 113; E by H at position 113; L by V at position 117; L by I at position 117; K by Q at position 121; K by T at position 121; R by H at position 125; R by Q at position 125; K by Q at position 133; K by T at position 133; E by Q at position 159 and E by H at position 159, wherein residue 1 corresponds to residue 1 of the mature IFN-α2a protein as depicted in FIG. 1 or wherein residue 1 corresponds to residue 1 of the mature IFN-α2b protein as depicted in FIG. 2; and further comprises an amino acid sequence that differs from the amino acid sequence of the parent polypeptide to the extent that the variant comprises one or more glycosylation sites not found in the parent polypeptide.

[0333] In another aspect, the parent polypeptide is IFN-α2a or IFN-α2b, and the hyperglycosylated or protease-resistant, hyperglycosylated polypeptide variant comprises one or more sets of dual-amino acid replacements in the IFN-α2a amino acid sequence depicted in FIG. 1, or in the IFN-α2b amino acid sequence depicted in FIG. 2, corresponding to:

[0334] D by N at position 2 and P by S at position 4;

[0335] D by N at position 2 and P by T at position 4;

[0336] L by N at position 3 and Q by S at position 5;

[0337] L by N at position 3 and Q by T at position 5;

[0338] P by N at position 4 and T by S at position 6;

[0339] P by N at position 4 and T by T at position 6;

[0340] Q by N at position 5 and H by S at position 7;

[0341] Q by N at position 5 and H by T at position 7;

[0342] T by N at position 6 and S by S at position 8;

[0343] T by N at position 6 and S by T at position 8;

[0344] H by N at position 7 and L by S at position 9;

[0345] H by N at position 7 and L by T at position 9;

[0346] S by N at position 8 and G by S at position 10;

[0347] S by N at position 8 and G by T at position 10;

[0348] L by N at position 9 and S by S at position 11;

[0349] L by N at position 9 and S by T at position 11;

[0350] M by N at position 21 and K by S at position 23;

[0351] M by N at position 21 and K by T at position 23;

[0352] R by N at position 22 and I by S at position 24;

[0353] R by N at position 22 and I by T at position 24;

[0354] R or K by N at position 23 and S by S at position 25;

[0355] R or K by N at position 23 and S by T at position 25;

[0356] I by N at position 24 and L by S at position 26;

[0357] I by N at position 24 and L by T at position 26;

[0358] S by N at position 25 and F by S at position 27;

[0359] S by N at position 25 and F by T at position 27;

[0360] L by N at position 26 and S by S at position 28;

[0361] L by N at position 26 and S by T at position 28;

[0362] S by N at position 28 and L by S at position 30;

[0363] S by N at position 28 and L by T at position 30;

[0364] L by N at position 30 and D by S at position 32;

[0365] L by N at position 30 and D by T at position 32;

[0366] K by N at position 31 and R by S at position 33;

[0367] K by N at position 31 and R by T at position 33;

[0368] D by N at position 32 and H by S at position 34;

[0369] D by N at position 32 and H by T at position 34;

[0370] R by N at position 33 and D by S at position 35;

[0371] R by N at position 33 and D by T at position 35;

[0372] H by N at position 34 and F by S at position 36;

[0373] H by N at position 34 and F by T at position 36;

[0374] D by N at position 35 and G by S at position 37;

[0375] D by N at position 35 and G by T at position 37;

[0376] F by N at position 36 and F by S at position 38;

[0377] F by N at position 36 and F by T at position 38;

[0378] G by N at position 37 and P by S at position 39;

[0379] G by N at position 37 and P by T at position 39;

[0380] F by N at position 38 and Q by S at position 40;

[0381] F by N at position 38 and Q by T at position 40;

[0382] P by N at position 39 and E by S at position 41;

[0383] P by N at position 39 and E by T at position 41;

[0384] Q by N at position 40 and E by S at position 42;

[0385] Q by N at position 40 and E by T at position 42;

[0386] E by N at position 41 and F by S at position 43;

[0387] E by N at position 41 and F by T at position 43;

[0388] E by N at position 42 and G by S at position 44;

[0389] E by N at position 42 and G by T at position 44;

[0390] F by N at position 43 and N by S at position 45;

[0391] F by N at position 43 and N by T at position 45;

[0392] G by N at position 44 and Q by S at position 46;

[0393] G by N at position 44 and Q by T at position 46;

[0394] N by N at position 45 and F by S at position 47;

[0395] N by N at position 45 and F by T at position 47;

[0396] Q by N at position 46 and Q by S at position 48;

[0397] Q by N at position 46 and Q by T at position 48;

[0398] F by N at position 47 and K by S at position 49;

[0399] F by N at position 47 and K by T at position 49;

[0400] Q by N at position 48 and A by S at position 50;

[0401] Q by N at position 48 and A by T at position 50;

[0402] K by N at position 49 and E by S at position 51;

[0403] K by N at position 49 and E by T at position 51;

[0404] A by N at position 50 and T by S at position 52;

[0405] A by N at position 50 and T by T at position 52;

[0406] S by N at position 68 and K by S at position 70;

[0407] S by N at position 68 and K by T at position 70;

[0408] K by N at position 70 and S by S at position 72;

[0409] K by N at position 70 and S by T at position 72;

[0410] A by N at position 75 and D by S at position 77;

[0411] A by N at position 75 and D by T at position 77;

[0412] D by N at position 77 and T by S at position 79;

[0413] D by N at position 77 and T by T at position 79;

[0414] I by N at position 100 and G by S at position 102;

[0415] I by N at position 100 and G by T at position 102;

[0416] Q by N at position 101 and V by S at position 103;

[0417] Q by N at position 101 and V by T at position 103;

[0418] G by N at position 102 and G by S at position 104;

[0419] G by N at position 102 and G by T at position 104;

[0420] V by N at position 103 and V by S at position 105;

[0421] V by N at position 103 and V by T at position 105;

[0422] G by N at position 104 and T by S at position 106;

[0423] G by N at position 104 and T by T at position 106;

[0424] V by N at position 105 and E by S at position 107;

[0425] V by N at position 105 and E by T at position 107;

[0426] T by N at position 106 and T by S at position 108;

[0427] T by N at position 106 and T by T at position 108;

[0428] E by N at position 107 and P by S at position 109;

[0429] E by N at position 107 and P by T at position 109;

[0430] T by N at position 108 and I by S at position 110;

[0431] T by N at position 108 and I by T at position 110;

[0432] K by N at position 138 and S by S at position 136;

[0433] K by N at position 138 and S by T at position 136;

[0434] S by N at position 154 and N by S at position 156;

[0435] S by N at position 154 and N by T at position 156;

[0436] T by N at position 155 and L by S at position 157;

[0437] T by N at position 155 and L by T at position 157;

[0438] N by N at position 156 and Q by S at position 158;

[0439] N by N at position 156 and Q by T at position 158;

[0440] L by N at position 157 and E by S at position 159;

[0441] L by N at position 157 and E by T at position 159;

[0442] Q by N at position 158 and S by S at position 160;

[0443] Q by N at position 158 and S by T at position 160;

[0444] E by N at position 159 and L by S at position 161;

[0445] E by N at position 159 and L by T at position 161;

[0446] S by N at position 160 and R by S at position 162;

[0447] S by N at position 160 and R by T at position 162;

[0448] L by N at position 161 and S by S at position 163;

[0449] L by N at position 161 and S by T at position 163;

[0450] R by N at position 162 and K by S at position 164;

[0451] R by N at position 162 and K by T at position 164;

[0452] S by N at position 163 and E by S at position 165; and

[0453] S by N at position 163 and E by T at position 165, wherein residue 1 corresponds to residue 1 of the mature IFN-α2a depicted in FIG. 1, or IFN-α2b depicted in FIG. 2; and further comprises an amino acid sequence that differs from the amino acid sequence of the parent polypeptide to the extent that the variant comprises one or more glycosylation sites not found in the parent polypeptide.

[0454] In another aspect, the parent polypeptide is IFN-α2a or IFN-α2b, and the hyperglycosylated or protease-resistant, hyperglycosylated polypeptide variant comprises one or more sets of dual-amino acid replacements in the IFN-α2a amino acid sequence depicted in FIG. 1, or in the IFN-α2b amino acid sequence depicted in FIG. 2, corresponding to:

[0455] Q by N at position 5 and H by S at position 7;

[0456] P by N at position 39 and E by S at position 41;

[0457] P by N at position 39 and E by T at position 41;

[0458] Q by N at position 40 and E by S at position 42;

[0459] Q by N at position 40 and E by T at position 42;

[0460] E by N at position 41 and F by S at position 43;

[0461] E by N at position 41 and F by T at position 43;

[0462] F by N at position 43 and N by S at position 45;

[0463] G by N at position 44 and Q by T at position 46;

[0464] N by N at position 45 and F by S at position 47;

[0465] N by N at position 45 and F by T at position 47;

[0466] Q by N at position 46 and Q by S at position 48;

[0467] F by N at position 47 and K by S at position 49;

[0468] F by N at position 47 and K by T at position 49;

[0469] I by N at position 100 and G by S at position 102;

[0470] I by N at position 100 and G by T at position 102;

[0471] V by N at position 105 and E by S at position 107;

[0472] V by N at position 105 and E by T at position 107;

[0473] T by N at position 106 and T by S at position 108;

[0474] T by N at position 106 and T by T at position 108;

[0475] E by N at position 107 and P by S at position 109;

[0476] E by N at position 107 and P by T at position 109;

[0477] L by N at position 157 and E by S at position 159;

[0478] L by N at position 157 and E by T at position 159;

[0479] E by N at position 159 and L by S at position 161; and

[0480] E by N at position 159 and L by T at position 161, wherein residue 1 corresponds to residue 1 of the mature IFN-α2a depicted in FIG. 1, or IFN-α2b depicted in FIG. 2; and further comprises an amino acid sequence that differs from the amino acid sequence of the parent polypeptide to the extent that the variant comprises one or more glycosylation sites not found in the parent polypeptide.

[0481] In some embodiments, the hyperglycosylated or protease-resistant, hyperglycosylated cytokine variant is an IFN-α2b, IFN-α2a, or an IFN-2c variant comprising one or more single amino acid replacements corresponding to the replacement of: N by D at position 45; D by G at position 94; G by R at position 102; A by G at position 139; or any combination thereof, where the amino acid numbering is as set forth in FIG. 1.

[0482] In some embodiments, a hyperglycosylated or protease-resistant, hyperglycosylated cytokine variant is an IFN-α2b, IFN-α2a, or an IFN-2c variant comprising one or more single amino acid replacements in any of SEQ ID Nos. 1, 182, 185 or 232 (e.g., in any of the sequences set forth in FIGS. 2, 1, 11, and 9, respectively) corresponding to the replacement: L by V at position 3; L by I at position 3; P by S at position 4; P by S at position 4; P by A at position 4; R by H at position 12; R by Q at position 12; R by H at position 13; R by Q at position 13; M by V at position 16; M by I at position 16; R by H at position 22; R by Q at position 22; R or K by H at position 23; R or K by Q at position 23; F by I at position 27; F by V at position 27; L by V at position 30; L by I at position 30; K by Q at position 31; K by T at position 31; R by H at position 33; R by Q at position 33; E by Q at position 41; E by H at position 41; K by Q at position 49; K by T at position 49; E by Q at position 58; E by H at position 58; K by Q at position 70; K by T at position 70; E by Q at position 78; E by H at position 78; K by Q at position 83; K by T at position 83; Y by H at position 89; Y by I at position 89; E by Q at position 96; E by H at position 96; E by Q at position 107; E by H at position 107; P by S at position 109; P by A at position 109; L by V at position 110; L by I at position 110; M by V at position 111; M by I at position 111; E by Q at position 113; E by H at position 113; L by V at position 117; L by I at position 117; R by H at position 120; R by Q at position 120; K by Q at position 121; K by T at position 121; R by H at position 125; R by Q at position 125; L by V at position 128; L by I at position 128; K by Q at position 131; K by T at position 131; E by Q at position 132; E by H at position 132; K by Q at position 133; K by T at position 133; K by Q at position 138; K by T at position 138; Y by H at position 135; Y by I at position 135; P by S at position 137; P by A at position 137; M by V at position 148; M by I at position 148; R by H at position 149; R by Q at position 149; E by Q at position 159; E by H at position 159; L by V at position 161; L by I at position 161; R by H at position 162; R by Q at position 162; K by Q at position 164; K by T at position 164; E by Q at position 165; or E by H at position 165; or any combination thereof, wherein residue 1 corresponds to residue 1 of the mature IFN-α2b or IFN-α2a cytokine set forth in SEQ ID NOS: 1 or 182 (or as set forth in FIGS. 2 and 1, respectively); and further comprising an amino acid sequence that differs from the amino acid sequence of the parent polypeptide to the extent that the variant comprises one or more glycosylation sites not found in the parent polypeptide.

[0483] In some embodiments, the hyperglycosylated or protease-resistant, hyperglycosylated cytokine variant is an IFN-α2b, IFN-α2a, or an IFN-2c variant comprising one or more single amino acid replacements in any of SEQ ID Nos. 1, 182, 185 or 232 (e.g., in any of the sequences set forth in FIGS. 2, 1, 11, and 9, respectively) corresponding to the replacement: L by V at position 3; L by I at position 3; P by S at position 4; P by A at position 4; R by H at position 12; R by Q at position 12; R by H at position 13; R by Q at position 13; M by V at position 16; M by I at position 16; R by H at position 22; R by Q at position 22; R or K by H at position 23; R or K by Q at position 23; F by I at position 27; F by V at position 27; L by V at position 30; L by I at position 30; K by Q at position 31; K by T at position 31; R by H at position 33; R by Q at position 33; E by Q at position 41; E by H at position 41; K by Q at position 49; K by T at position 49; E by Q at position 58; E by H at position 58; K by Q at position 70; K by T at position 70; E by Q at position 78; E by H at position 78; K by Q at position 83; K by T at position 83; Y by H at position 89; Y by I at position 89; E by Q at position 96; E by H at position 96; E by Q at position 107; E by H at position 107; P by S at position 109; P by A at position 109; L by V at position 110; L by I at position 110; M by V at position 111; M by I at position 111; E by Q at position 113; E by H at position 113; L by V at position 117; L by I at position 117; R by H at position 120; R by Q at position 120; K by Q at position 121; K by T at position 121; R by H at position 125; R by Q at position 125; L by V at position 128; L by I at position 128; K by Q at position 131; K by T at position 131; E by Q at position 132; E by H at position 132; K by Q at position 133; K by T at position 133; K by Q at position 138; K by T at position 138; Y by H at position 135; Y by I at position 135; P by S at position 137; P by A at position 137; M by V at position 148; M by I at position 148; R by H at position 149; R by Q at position 149; E by Q at position 159; E by H at position 159; L by V at position 161; L by I at position 161; R by H at position 162; R by Q at position 162; K by Q at position 164; K by T at position 164; E by Q at position 165; E by H at position 165; N by D at position 45; D by G at position 94; G by R at position 102; or A by G at position 139; or any combination thereof, wherein residue 1 corresponds to residue 1 of the mature IFN-α2b or IFN-α2a cytokine set forth in SEQ ID No. 1 or 182; and further comprising an amino acid sequence that differs from the amino acid sequence of the parent polypeptide to the extent that the variant comprises one or more glycosylation sites not found in the parent polypeptide.

[0484] In some embodiments, any of the above-described protease-resistant or protease-resistant, hyperglycosylated IFN-α2a variants is an [D102N]IFN-α2a glycopeptide, where the [D102N]IFN-α2a glycopeptide is a variant of IFN-α2a having (a) an asparagine residue in place of the native aspartic acid residue at amino acid position 102 in the amino acid sequence of IFN-α2a corresponding to the native aspartic acid residue at amino acid position 99 depicted in FIG. 24 (where the amino acid position is as set forth in FIG. 24; and corresponds to D71 of the sequence set forth in FIG. 1); and (b) a carbohydrate moiety covalently attached to the R-group of said asparagine residue. In some embodiments, the IFN-α2a sequence has a lysine residue in place of the arginine residue at amino acid position 50 in the IFN-α2b sequence shown in FIG. 24 (corresponding to amino acid position 23 of the IFN-α2b sequence shown in FIG. 2).

[0485] In some embodiments, any of the above-described protease-resistant or protease-resistant, hyperglycosylated IFN-α2a variants is an [D102N, D108N]IFN-α2a glycopeptide, where the [D102N, D108N]IFN-α2a glycopeptide is a variant of IFN-α2a having (a) an asparagine residue in place of the native aspartic acid residue at each of amino acid positions 102 and 108 in the amino acid sequence of IFN-α2a corresponding to the native aspartic acid residue at amino acid positions 99 and 105 depicted in FIG. 24 (where the amino acid positions are as set forth in FIG. 24; and where D99 and D105 in FIG. 24 correspond to D71 and D77, respectively, in FIG. 1); and (b) a carbohydrate moiety covalently attached to the R-group of each of said asparagine residues. In some embodiments, the IFN-α2a sequence has a lysine residue in place of the arginine residue at amino acid position 50 in the IFN-α2b sequence shown in FIG. 24 (corresponding to Arg 23 in the IFN-α2b sequence shown in FIG. 2).

[0486] In some embodiments, any of the above-described protease-resistant or protease-resistant, hyperglycosylated IFN-α2b variants is an [D102N]IFN-α2b glycopeptide, where the [D102N]IFN-α2b glycopeptide is a variant of IFN-α2b having (a) an asparagine residue in place of the native aspartic acid residue at amino acid position 102 in the amino acid sequence of IFN-α2b corresponding to the native aspartic acid residue at amino acid position 99 depicted in FIG. 24 (where the amino acid position is as set forth in FIG. 24; and where D99 in FIG. 24 corresponds to D71 in FIGS. 1 and 2); and (b) a carbohydrate moiety covalently attached to the R-group of said asparagine residue.

[0487] In some embodiments, any of the above-described protease-resistant or protease-resistant, hyperglycosylated IFN-α2b variants is an [D102N, D108N]IFN-α2b glycopeptide, where the [D102N, D108N]IFN-α2b glycopeptide is a variant of IFN-α2b having (a) an asparagine residue in place of the native aspartic acid residue at each of amino acid positions 102 and 108 in the amino acid sequence of IFN-α2b corresponding to the native aspartic acid residues at amino acid positions 99 and 105 depicted in FIG. 24 (where the amino acid positions are as set forth in FIG. 24; and where D99 and D105 in FIG. 24 correspond to D71 and D77, respectively, in FIGS. 1 and 2); and (b) a carbohydrate moiety covalently attached to the R-group of each of said asparagine residues.

[0488] In another aspect, any of the aforementioned protease-resistant or protease-resistant, hyperglycosylated IFN-α2a or IFN-α2b polypeptide variants further comprises one or more pseudo-wild type mutations. In particular embodiments, any of the aforementioned protease-resistant or protease-resistant, hyperglycosylated IFN-α2a polypeptide variants further comprises one or more pseudo-wild type mutations at one or more of amino acid residues 9, 10, 17, 20, 24, 25, 35, 37, 41, 52, 54, 56, 57, 58, 60, 63, 64, 65, 76, 89, and 90 as depicted in FIG. 1, wherein the mutation(s) are one or more of an insertion, a deletion, and a replacement of the native amino acid residue. In other particular embodiments, any of the aforementioned protease-resistant or protease-resistant, hyperglycosylated IFN-α2b polypeptide variants further comprises one or more pseudo-wild type mutations at one or more of amino acid residues 9, 10, 17, 20, 24, 25, 35, 37, 41, 52, 54, 56, 57, 58, 60, 63, 64, 65, 76, 89, and 90 as depicted in FIG. 2, wherein the mutation(s) are one or more of an insertion, a deletion, and a replacement of the native amino acid residue.

[0489] Exemplary pseudo-wild type replacements are one or more mutations in the IFN-α2a amino acid sequence depicted in FIG. 1, or the IFN-α2b amino acid sequence depicted in FIG. 2, corresponding to: P by A at position 4; Q by A at position 5, T by A at position 6; L by A at position 9, LG by A at position 10; L by A at position 17, Q by A at position 20; I by A at position 24, S by A at position 25; D by A at position 35, G by A at position 37; G by A at position 39; E by A at position 41; E by A at position 42 E by A at position 51; T by A at position 52, P by A at position 54; V by A at position 55 L by A at position 56; H by A at position 57, E by A at position 58; I by A at position 60, I by A at position 63; F by A at position 64, N by A at position 65; W by A at position 76, D by A at position 77; E by A at position 78 L by A at position 81; Y by A at position 85 Y by A at position 89; Q by A at position 90 G by A at position 104; L by A at position 110 S by A at position 115 and E by A at position 146.

[0490] In another aspect, any of the aforementioned protease-resistant or protease-resistant, hyperglycosylated IFN-α2a or IFN-α2b polypeptide variants further comprises one or more pseudo-wild type mutations. In particular embodiments, any of the aforementioned protease-resistant IFN-α2a polypeptide variants further comprises one or more pseudo-wild type mutations at one or more of amino acid residues 4, 5, 6, 9, 10, 17, 20, 24, 25, 35, 37, 39, 41, 42, 51, 52, 54, 56, 57, 58, 60, 63, 64, 65, 76, 77, 78, 81, 85, 89, 90, 104, 110, 115 and 146 as depicted in FIG. 1, wherein the mutation(s) are one or more of an insertion, a deletion, and a replacement of the native amino acid residue. In other particular embodiments, any of the aforementioned protease-resistant or protease-resistant, hyperglycosylated IFN-α2b polypeptide variants further comprises one or more pseudo-wild type mutations at one or more of amino acid residues 4, 5, 6, 9, 10, 17, 20, 24, 25, 35, 37, 39, 41, 42, 51, 52, 54, 56, 57, 58, 60, 63, 64, 65, 76, 77, 78, 81, 85, 89, 90, 104, 110, 115 and 146 as depicted in FIG. 2, wherein the mutation(s) are one or more of an insertion, a deletion, and a replacement of the native amino acid residue.

[0491] Exemplary pseudo-wild type replacements are one or more mutations in the IFN-α2a amino acid sequence depicted in FIG. 1, or the IFN-α2b amino acid sequence depicted in FIG. 2, corresponding to: P by A at position 4; Q by A at position 5; T by A at position 6; L by A at position 9; LG by A at position 10; L by A at position 17; Q by A at position 20; I by A at position 24; S by A at position 25; D by A at position 35; G by A at position 37; G by A at position 39; E by A at position 41; E by A at position 42; E by A at position 51; T by A at position 52; P by A at position 54; V by A at position 55; L by A at position 56; H by A at position 57; E by A at position 58; I by A at position 60; I by A at position 63; F by A at position 64; N by A at position 65; W by A at position 76; D by A at position 77; E by A at position 78; L by A at position 81; Y by A at position 85; Y by A at position 89, Q by A at position 90; G by A at position 104; L by A at position 110; S by A at position 115 and E by A at position 146.

[0492] In some embodiments, the hyperglycosylated or protease-resistant, hyperglycosylated polypeptide variant is a variant of a parent cytokine that exhibits anti-viral activity. In some embodiments, the hyperglycosylated or protease-resistant, hyperglycosylated anti-viral cytokine (e.g., a protease-resistant or protease-resistant, hyperglycosylated variant of IFN-α2a polypeptide, an IFN-α2b polypeptide, an IFN-γ polypeptide) exhibits at least about 10%, at least about 20%, at least about 30%, at least about 40%, at least about 50%, at least about 60%, at least about 70%, at least about 80%, at least about 90%, or up to about 100% retention of the antiviral activity when compared to the corresponding unmodified (parent) cytokine (e.g., when compared to the parent IFN-α2a polypeptide, an IFN-α2b polypeptide, or IFN-γ polypeptide).

[0493] Antiviral activity is readily detected using any known assay. For example, the antiviral activity of an IFN-α2a polypeptide is tested in vitro in the following manner. An interferon-sensitive HeLa cell line (e.g., ATCC accession no. CCL-2) is contacted in vitro with an IFN-α2a polypeptide; subsequently, the cells are contacted with encephalomyocarditis virus (EMCV). Antiviral activity is detected by assessing cytopathic effect (CPE); or by measuring the amount of EMCV mRNA in extracts of infected cells using reverse transcription-polymerase chain reaction (RT-PCR).

[0494] The assay can be quantitative. For example, in some embodiments, the antiviral activity is assessed by reverse transcription quantitative polymerase chain reaction (RT-qPCR). For example, confluent cells (e.g., ATCC accession no. CCL-2) are plated at a density of 2×10⁴ cells/well in a suitable culture medium (e.g., DMEM 5% SVF medium). Cells are then incubated with IFN-α2b at a concentration of 500 U/ml for 24 hours at 37° C. After the 24-hour incubation with IFN-α2b, the cells are challenged with EMCV (MOI=100). After incubation with virus for 16 hours, or when virus-induce CPE is near maximum in control cells not treated with IFN-α2b, the number of EMCV particles in each well is determined by RT-PCR quantification of EMCV mRNA in cell lysates. RNA is purified from the cell lysates. See, e.g., U.S. Patent Publication No. 2004/0132977.

[0495] In some embodiments, the hyperglycosylated or protease-resistant, hyperglycosylated polypeptide variant is effective in reducing viral load in an individual. Viral load can be measured by measuring the titer or level of virus in serum. These methods include, but are not limited to, a quantitative polymerase chain reaction (PCR) and a branched DNA (bDNA) test. Quantitative assays for measuring the viral load (titer) of HCV RNA have been developed. Many such assays are available commercially, including a quantitative reverse transcription PCR (RT-PCR) (Amplicor HCV Monitor™, Roche Molecular Systems, New Jersey); and a branched DNA (deoxyribonucleic acid) signal amplification assay (Quantiplex™ HCV RNA Assay (bDNA), Chiron Corp., Emeryville, Calif.). See, e.g., Gretch et al. (11025) Ann. Intern. Med. 123:321-329. Also of interest is a nucleic acid test (NAT), developed by Gen-Probe Inc. (San Diego) and Chiron Corporation, and sold by Chiron Corporation under the trade name Procleix®, which NAT simultaneously tests for the presence of HIV-1 and HCV. See, e.g., Vargo et al. (2002) Transfusion 42:876-885.

[0496] In some embodiments, the hyperglycosylated or protease-resistant, hyperglycosylated anti-viral cytokine variant (e.g., a protease-resistant variant of IFN-α2a polypeptide, an IFN-α2b polypeptide, an IFN-γ polypeptide) exhibits retention of anti-proliferative activity compared to the unmodified (parent) cytokine protein therapeutic.

[0497] Anti-proliferative activity can be measured using any known method. For example, anti-proliferative activity is assessed by measuring cell proliferation in the presence of the protease-resistant anti-viral cytokine variant, where cell proliferation is measured using any convenient assay. Cell proliferation is measured using assays based on ³H-thymidine incorporation; incorporation of the thymidine analog BrdU; cleavage of a tetrazolium salt; DNA-dye complex formation; and the like. One non-limiting example of a suitable assay for cell proliferation is The CellTiter 96® AQueous Non-Radioactive Cell Proliferation Assay (Promega). The CellTiter 96® Aqueous assay is a colorimetric method for determining the number of viable cells in proliferation or chemosensitivity assays. The CellTiter 96® AQueous Assay is composed of solutions of a tetrazolium compound (3-(4,5-dimethylthiazol-2-yl)-5-(3-carboxymethoxyphenyl)-2-(4-sulfophenyl)-2H-tetrazolium, inner salt; MTS) and an electron coupling reagent (phenazine methosulfate; PMS). MTS is bioreduced by cells into a formazan product that is soluble in tissue culture medium. The absorbance of the formazan at 490 nm can be measured directly from 96 well assay plates without additional processing. The conversion of MTS into aqueous, soluble formazan is accomplished by dehydrogenase enzymes found in metabolically active cells. The quantity of formazan product as measured by the amount of 490 nm absorbance is directly proportional to the number of living cells in culture.

[0498] In some embodiments, the hyperglycosylated or protease-resistant, hyperglycosylated anti-viral cytokine variant (e.g., a hyperglycosylated, protease-resistant variant of IFN-α2a polypeptide, an IFN-α2b polypeptide, an IFN-γ polypeptide) binds to an interferon receptor, but exhibits decreased antiviral activity compared to the unmodified (parent) cytokine protein therapeutic, or exhibits decreased anti-proliferative activity, compared to the parent cytokine protein therapeutic.

[0499] In some embodiments, the hyperglycosylated or protease-resistant, hyperglycosylated anti-viral cytokine variant (e.g., a protease-resistant variant of IFN-α2a polypeptide, an IFN-α2b polypeptide, an IFN-γ polypeptide) comprises two or more mutations, e.g., the protease-resistant anti-viral cytokine variant comprises two, three, four, five, six, seven, eight, nine, or ten single amino acid changes compared to the corresponding parent cytokine. In some embodiments, the hyperglycosylated or protease-resistant, hyperglycosylated anti-viral cytokine variant is a variant of an IFN-α2a polypeptide. In other embodiments, the hyperglycosylated or protease-resistant, hyperglycosylated anti-viral cytokine variant is a variant of an IFN-α2a polypeptide. In other embodiments, the hyperglycosylated or protease-resistant, hyperglycosylated anti-viral cytokine variant is a variant of an IFN-γ polypeptide.

[0500] In some embodiments, the hyperglycosylated or protease-resistant, hyperglycosylated polypeptide cytokine variant comprises an amino acid sequence as set forth in any one of SEQ ID NOs:2-181, where the arginine at position 23 is replaced with a lysine; and further comprises an amino acid sequence that differs from the amino acid sequence of the parent polypeptide to the extent that the variant comprises one or more glycosylation sites not found in the parent polypeptide. In other embodiments, the hyperglycosylated or protease-resistant, hyperglycosylated polypeptide cytokine variant exhibits greater resistance to proteolysis compared to the unmodified (parent) cytokine, and the protease-resistant or protease-resistant, hyperglycosylated polypeptide cytokine variant comprises one or more amino acid replacements at one or more positions on the cytokine, corresponding to a structurally-related modified amino acid position within the 3-D structure of a IFN-α2a polypeptide, a IFN-α2b polypeptide, a IFN-α2c polypeptide, or a consensus IFN-α as depicted in FIG. 9. In some embodiments, resistance to proteolysis is measured by contacting the polypeptide variant in vitro, as described above. In other embodiments, resistance to proteolysis is measured by contacting the polypeptide variant in vitro or in vivo with blood (e.g., human blood). In other embodiments, resistance to proteolysis is measured by contacting the polypeptide variant in vitro with serum (e.g., human serum), as described above.

[0501] In some embodiments, any of the above-described protease-resistant or protease-resistant, hyperglycosylated polypeptide IFN-α2b variants has increased stability compared to the unmodified (parent) cytokine, where the stability is assessed by measuring residual biological activity to either inhibit viral replication or to inhibit cell proliferation in appropriate cells, after incubation with either a mixture of proteases, individual proteases, blood lysate, or serum, as described above.

[0502] In some embodiments, any of the above-described protease-resistant or protease-resistant, hyperglycosylated polypeptide IFN-α2b variants has increased biological activity compared to the unmodified (parent) cytokine, where the activity is assessed by the capacity to either inhibit viral replication in appropriate cells, or to inhibit cell proliferation in appropriate cells, after incubation with either a mixture of proteases, individual proteases, blood lysate, or serum, as described above.

[0503] In some embodiments, any of the above-described protease-resistant or protease-resistant, hyperglycosylated polypeptide IFN-α2a variants has increased stability compared to the unmodified (parent) cytokine, where the stability is assessed by measuring residual biological activity to either inhibit viral replication or to inhibit cell proliferation in appropriate cells, after incubation with either a mixture of proteases, individual proteases, blood lysate, or serum, as described above.

[0504] In some embodiments, any of the above-described protease-resistant or protease-resistant, hyperglycosylated polypeptide IFN-α2a variants has increased biological activity compared to the unmodified (parent) cytokine, where the activity is assessed by the capacity to either inhibit viral replication in appropriate cells, or to inhibit cell proliferation in appropriate cells, after incubation with either a mixture of proteases, individual proteases, blood lysate, or serum, as described above.

[0505] In some embodiments, any of the above-described protease-resistant or protease-resistant, hyperglycosylated polypeptide IFN-α2c variants has increased stability compared to the unmodified (parent) cytokine, where the stability is assessed by measuring residual biological activity after incubation with either a mixture of proteases, individual proteases, blood lysate, or serum, as described above.

[0506] In some embodiments, any of the above-described protease-resistant or protease-resistant, hyperglycosylated polypeptide IFN-α2c variants has increased biological activity compared to the unmodified (parent) cytokine, after incubation with either a mixture of proteases, individual proteases, blood lysate, or serum, as described above.

3-D Structural Homologs

[0507] In some embodiments, a hyperglycosylated, protease-resistant polypeptide variant is a modified cytokine. In some embodiments, a hyperglycosylated, protease-resistant cytokine variant is a modified interferon. In some embodiments, any of the above-described hyperglycosylated, protease-resistant cytokine variants that is a structural homolog of IFN-α2b comprises one or more amino acid replacements at positions corresponding to the 3—dimensional-structurally-similar modified positions within the 3-D structure of the modified IFN-α2b, IFN-α2α, IFN-α2c, or a consensus IFN-α as depicted in FIG. 9. In some embodiments, the structural homolog has increased resistance to proteolysis compared to its unmodified (parent) cytokine counterpart, where the resistance to proteolysis is measured by mixture with a protease in vitro, incubation with blood or incubation with serum, as described above.

[0508] In some embodiments, the hyperglycosylated, protease-resistant cytokine variant is a structural homolog of an IFN-α cytokine. In some embodiments, the hyperglycosylated, protease-resistant IFN-α variant is a structural homolog of IFN-α2b. In some of these embodiments, the IFN-α cytokine is selected from variants of IFN-α2a, IFN-α2c, IFN-α, IFN-ad, IFN-α5, IFN-α6, IFN-α4, IFN-α4b, IFN-αI, IFN-αJ, IFN-αH, IFN-αF, IFN-α8, and a consensus IFN-α. Thus, in some embodiments, the known hyperglycosylated, protease-resistant IFN-α variant comprises one or more amino acid replacements at one or more target positions in the amino acid sequence of IFN-α2a, IFN-α2c, IFN-α, IFN-ad, IFN-α5, IFN-α6, IFN-α4, IFN-α4b, IFN-αI, IFN-αJ, IFN-αH, IFN-αF, IFN-α8, or a consensus IFN-α, corresponding to a structurally-related modified amino acid position within the 3-dimensional structure of the IFN-α2b modified proteins described above. The replacements lead to greater resistance to proteases, as assessed by incubation with a protease or a with a blood lysate or by incubation with serum, compared to the unmodified (parent) IFN-α, e.g., compared to a parent IFN-α2a, or IFN-α2b polypeptide.

[0509] In some embodiments, the hyperglycosylated, protease-resistant IFN-α variant is a modified IFN-α2a cytokine, comprising one or more amino acid replacements at one or more target positions in the amino acid sequence set forth in FIG. 1 (or SEQ ID NO:182) corresponding to a structurally-related modified amino acid position within the 3-dimensional structure of an above-described IFN-α2b variant, where the replacement(s) lead to greater resistance to proteases, as assessed by incubation with a protease or with a blood lysate or by incubation with serum (as described above), compared to the unmodified IFN-α2a.

[0510] In some embodiments, the hyperglycosylated, protease-resistant IFN-α2a variant comprises one or more single amino acid replacements at one or more target positions in SEQ ID NO: 182 (or the amino acid sequence set forth in FIG. 1), corresponding to any of amino acid positions: 41, 58, 78, 107, 117, 125, 133 and 159; and further comprises an amino acid sequence that differs from the amino acid sequence of the parent polypeptide to the extent that the variant comprises one or more glycosylation sites not found in the parent polypeptide.

[0511] In other embodiments, the hyperglycosylated, protease-resistant IFN-α variant is a modified IFN-α cytokine, comprising one or more amino acid replacements at one or more target positions in SEQ ID NO:183 (as set forth in FIG. 10) corresponding to a structurally-related modified amino acid position within the 3-dimensional structure of an above-described IFN-α2b polypeptide variant, where the replacement(s) lead to greater resistance to proteases, as assessed by incubation with a protease or with a blood lysate or by incubation with serum (as described above), compared to the unmodified IFN-α. In some of these embodiments, the modified IFN-α is selected from among proteins comprising one or more single amino acid replacements at one or more target positions in SEQ ID NO: 183 (as set forth in FIG. 10), corresponding to any of amino acid positions: 41, 59, 79, 108, 118, 126, 138 and 160; where the variant further comprises an amino acid sequence that differs from the amino acid sequence of the parent polypeptide to the extent that the variant comprises one or more glycosylation sites not found in the parent polypeptide.

[0512] In other embodiments, the hyperglycosylated, protease-resistant IFN-α variant is a modified IFN-α2c cytokine, comprising one or more amino acid replacements at one or more target positions in SEQ ID NO:185 (as set forth in FIG. 11) corresponding to a structurally-related modified amino acid position within the 3-dimensional structure of an above-described IFN-α2b polypeptide variant, where the replacement(s) lead to greater resistance to proteases, as assessed by incubation with a protease or with a blood lysate or by incubation with serum (as described above), compared to the unmodified IFN-α2c. In some of these embodiments, the modified IFN-α2c is selected from among proteins comprising one or more single amino acid replacements at one or more target positions in SEQ ID NO: 185 (as set forth in FIG. 11), corresponding to any of amino acid positions: 41, 58, 78, 107, 117, 125, 133 and 159, or to any of amino acid positions: 27, 33, 41, 59, 79, 90, 108, 110, 111, 112, 114, 118, 122, 126, 138, and 160; where the variant further comprises an amino acid sequence that differs from the amino acid sequence of the parent polypeptide to the extent that the variant comprises one or more glycosylation sites not found in the parent polypeptide.

[0513] In some embodiments, any of the above-described hyperglycosylated, protease-resistant IFN-α2c variants has increased stability compared to the unmodified (parent) cytokine, where the stability is assessed by measuring residual biological activity after incubation with either a mixture of proteases, individual proteases, blood lysate, or serum, as described above. In other embodiments, any of the above-described hyperglycosylated, protease-resistant IFN-α2c variants has increased biological activity compared to the unmodified (parent) cytokine, after incubation with either a mixture of proteases, individual proteases, blood lysate, or serum, as described above.

[0514] In other embodiments, the hyperglycosylated, protease-resistant IFN-α variant is a modified IFN-αd cytokine, comprising one or more amino acid replacements at one or more target positions in SEQ ID NO:186 (as set forth in FIG. 12) corresponding to a structurally-related modified amino acid position within the 3-dimensional structure of an above-described IFN-α2b polypeptide variant, where the replacement(s) lead to greater resistance to proteases, as assessed by incubation with a protease or with a blood lysate or by incubation with serum (as described above), compared to the unmodified IFN-αd. In some of these embodiments, the modified IFN-αd is selected from among proteins comprising one or more single amino acid replacements at one or more target positions in SEQ ID NO: 186 (as set forth in FIG. 12), corresponding to any of amino acid positions: 41, 59, 79, 108, 118, 126, 138 and 160, or to any of amino acid positions: 27, 33, 41, 59, 79, 90, 108, 110, 111, 112, 114, 118, 122, 126, 138, and 160; where the variant further comprises an amino acid sequence that differs from the amino acid sequence of the parent polypeptide to the extent that the variant comprises one or more glycosylation sites not found in the parent polypeptide.

[0515] In some embodiments, any of the above-described hyperglycosylated, protease-resistant IFN-αd variants has increased stability compared to the unmodified (parent) cytokine, where the stability is assessed by measuring residual biological activity after incubation with either a mixture of proteases, individual proteases, blood lysate, or serum, as described above. In other embodiments, any of the above-described hyperglycosylated, protease-resistant IFN-αd variants has increased biological activity compared to the unmodified (parent) cytokine, after incubation with either a mixture of proteases, individual proteases, blood lysate, or serum, as described above.

[0516] In other embodiments, the hyperglycosylated, protease-resistant IFN-α variant is a modified IFN-α5 cytokine, comprising one or more amino acid replacements at one or more target positions in SEQ ID NO:187 (as set forth in FIG. 13) corresponding to a structurally-related modified amino acid position within the 3-dimensional structure of an above-described IFN-α2b polypeptide variant, where the replacement(s) lead to greater resistance to proteases, as assessed by incubation with a protease or with a blood lysate or by incubation with serum (as described above), compared to the unmodified IFN-α5. In some of these embodiments, the modified IFN-α5 is selected from among proteins comprising one or more single amino acid replacements at one or more target positions in SEQ ID NO: 187 (as set forth in FIG. 13), corresponding to any of amino acid positions: 41, 59, 79, 108, 118, 126, 138 and 160, or to any of amino acid positions: 27, 33, 41, 59, 79, 90, 108, 110, 111, 112, 114, 118, 122, 126, 138, and 160; where the variant further comprises an amino acid sequence that differs from the amino acid sequence of the parent polypeptide to the extent that the variant comprises one or more glycosylation sites not found in the parent polypeptide.

[0517] In some embodiments, any of the above-described hyperglycosylated, protease-resistant IFN-α5 variants has increased stability compared to the unmodified (parent) cytokine, where the stability is assessed by measuring residual biological activity after incubation with either a mixture of proteases, individual proteases, blood lysate, or serum, as described above. In other embodiments, any of the above-described hyperglycosylated, protease-resistant IFN-α5 variants has increased biological activity compared to the unmodified (parent) cytokine, after incubation with either a mixture of proteases, individual proteases, blood lysate, or serum, as described above.

[0518] In other embodiments, the hyperglycosylated, protease-resistant IFN-α variant is a modified IFN-α6 cytokine, comprising one or more amino acid replacements at one or more target positions in SEQ ID NO:188 (as set forth in FIG. 14) corresponding to a structurally-related modified amino acid position within the 3-dimensional structure of an above-described IFN-α2b polypeptide variant, where the replacement(s) lead to greater resistance to proteases, as assessed by incubation with a protease or with a blood lysate or by incubation with serum (as described above), compared to the unmodified IFN-α6. In some of these embodiments, the modified IFN-α6 is selected from among proteins comprising one or more single amino acid replacements at one or more target positions in SEQ ID NO: 188 (as set forth in FIG. 14), corresponding to any of amino acid positions: 41, 59, 79, 108, 118, 126, 138 and 160, or to any of amino acid positions: 27, 33, 41, 59, 79, 90, 108, 110, 111, 112, 114, 118, 122, 126, 138, and 160; where the variant further comprises an amino acid sequence that differs from the amino acid sequence of the parent polypeptide to the extent that the variant comprises one or more glycosylation sites not found in the parent polypeptide.

[0519] In some embodiments, any of the above-described hyperglycosylated, protease-resistant IFN-α6 variants has increased stability compared to the unmodified (parent) cytokine, where the stability is assessed by measuring residual biological activity after incubation with either a mixture of proteases, individual proteases, blood lysate, or serum, as described above. In other embodiments, any of the above-described hyperglycosylated, protease-resistant IFN-α6 variants has increased biological activity compared to the unmodified (parent) cytokine, after incubation with either a mixture of proteases, individual proteases, blood lysate, or serum, as described above.

[0520] In other embodiments, the hyperglycosylated, protease-resistant IFN-α polypeptide variant is a modified IFN-α4 cytokine, comprising one or more amino acid replacements at one or more target positions in SEQ ID NO:189 (as set forth in FIG. 15) corresponding to a structurally-related modified amino acid position within the 3-dimensional structure of an above-described IFN-α2b polypeptide variant, where the replacement(s) lead to greater resistance to proteases, as assessed by incubation with a protease or with a blood lysate or by incubation with serum (as described above), compared to the unmodified IFN-α4. In some of these embodiments, the modified IFN-α4 is selected from among proteins comprising one or more single amino acid replacements at one or more target positions in SEQ ID NO: 189 (as set forth in FIG. 15), corresponding to any of amino acid positions: 41, 59, 79, 108, 118, 126, 138 and 160, or to any of amino acid positions: 27, 33, 41, 59, 79, 90, 108, 110, 111, 112, 114, 118, 122, 126, 138, and 160; where the variant further comprises an amino acid sequence that differs from the amino acid sequence of the parent polypeptide to the extent that the variant comprises one or more glycosylation sites not found in the parent polypeptide.

[0521] In some embodiments, any of the above-described hyperglycosylated, protease-resistant IFN-α4 variants has increased stability compared to the unmodified (parent) cytokine, where the stability is assessed by measuring residual biological activity after incubation with either a mixture of proteases, individual proteases, blood lysate, or serum, as described above. In other embodiments, any of the above-described hyperglycosylated, protease-resistant IFN-α4 variants has increased biological activity compared to the unmodified (parent) cytokine, after incubation with either a mixture of proteases, individual proteases, blood lysate, or serum, as described above.

[0522] In other embodiments, the hyperglycosylated, protease-resistant IFN-α variant is a modified IFN-α4b cytokine, comprising one or more amino acid replacements at one or more target positions in SEQ ID NO:190 (as set forth in FIG. 16) corresponding to a structurally-related modified amino acid position within the 3-dimensional structure of an above-described IFN-α2b polypeptide variant, where the replacement(s) lead to greater resistance to proteases, as assessed by incubation with a protease or with a blood lysate or by incubation with serum (as described above), compared to the unmodified IFN-α4b. In some of these embodiments, the modified IFN-α4b is selected from among proteins comprising one or more single amino acid replacements at one or more target positions in SEQ ID NO: 190 (as set forth in FIG. 16), corresponding to any of amino acid positions: 41, 59, 79, 108, 118, 126, 138 and 160, or to any of amino acid positions: 27, 33, 41, 59, 79, 90, 108, 110, 111, 112, 114, 118, 122, 126, 138, and 160; where the variant further comprises an amino acid sequence that differs from the amino acid sequence of the parent polypeptide to the extent that the variant comprises one or more glycosylation sites not found in the parent polypeptide.

[0523] In some embodiments, any of the above-described hyperglycosylated, protease-resistant IFN-α4b variants has increased stability compared to the unmodified (parent) cytokine, where the stability is assessed by measuring residual biological activity after incubation with either a mixture of proteases, individual proteases, blood lysate, or serum, as described above. In other embodiments, any of the above-described hyperglycosylated, protease-resistant IFN-α4b variants has increased biological activity compared to the unmodified (parent) cytokine, after incubation with either a mixture of proteases, individual proteases, blood lysate, or serum, as described above.

[0524] In other embodiments, the hyperglycosylated, protease-resistant IFN-α variant is a modified IFN-α1 cytokine, comprising one or more amino acid replacements at one or more target positions in SEQ ID NO:191 (as set forth in FIG. 17) corresponding to a structurally-related modified amino acid position within the 3-dimensional structure of an above-described IFN-α2b polypeptide variant, where the replacement(s) lead to greater resistance to proteases, as assessed by incubation with a protease or with a blood lysate or by incubation with serum (as described above), compared to the unmodified IFN-αI. In some of these embodiments, the modified IFN-αI is selected from among proteins comprising one or more single amino acid replacements at one or more target positions in SEQ ID NO: 191 (as set forth in FIG. 17), corresponding to any of amino acid positions: 41, 59, 79, 108, 118, 126, 138 and 160, or to any of amino acid positions: 27, 33, 41, 59, 79, 90, 108, 110, 111, 112, 114, 118, 122, 126, 138, and 160; where the variant further comprises an amino acid sequence that differs from the amino acid sequence of the parent polypeptide to the extent that the variant comprises one or more glycosylation sites not found in the parent polypeptide.

[0525] In some embodiments, any of the above-described hyperglycosylated, protease-resistant IFN-αI variants has increased stability compared to the unmodified (parent) cytokine, where the stability is assessed by measuring residual biological activity after incubation with either a mixture of proteases, individual proteases, blood lysate, or serum, as described above. In other embodiments, any of the above-described hyperglycosylated, protease-resistant IFN-αI variants has increased biological activity compared to the unmodified (parent) cytokine, after incubation with either a mixture of proteases, individual proteases, blood lysate, or serum, as described above.

[0526] In other embodiments, the hyperglycosylated, protease-resistant IFN-α variant is a modified IFN-αJ cytokine, comprising one or more amino acid replacements at one or more target positions in SEQ ID NO:192 (as set forth in FIG. 18) corresponding to a structurally-related modified amino acid position within the 3-dimensional structure of an above-described IFN-α2b polypeptide variant, where the replacement(s) lead to greater resistance to proteases, as assessed by incubation with a protease or with a blood lysate or by incubation with serum (as described above), compared to the unmodified IFN-αJ. In some of these embodiments, the modified IFN-αJ is selected from among proteins comprising one or more single amino acid replacements at one or more target positions in SEQ ID NO: 192 (as set forth in FIG. 18), corresponding to any of amino acid positions: 41, 59, 79, 108, 118, 126, 138 and 160, or to any of amino acid positions: 27, 33, 41, 59, 79, 90, 108, 110, 111, 112, 114, 118, 122, 126, 138, and 160; where the variant further comprises an amino acid sequence that differs from the amino acid sequence of the parent polypeptide to the extent that the variant comprises one or more glycosylation sites not found in the parent polypeptide.

[0527] In some embodiments, any of the above-described hyperglycosylated, protease-resistant IFN-αJ variants has increased stability compared to the unmodified (parent) cytokine, where the stability is assessed by measuring residual biological activity after incubation with either a mixture of proteases, individual proteases, blood lysate, or serum, as described above. In other embodiments, any of the above-described hyperglycosylated, protease-resistant IFN-αJ variants has increased biological activity compared to the unmodified (parent) cytokine, after incubation with either a mixture of proteases, individual proteases, blood lysate, or serum, as described above.

[0528] In other embodiments, the hyperglycosylated, protease-resistant IFN-α variant is a modified IFN-αH cytokine, comprising one or more amino acid replacements at one or more target positions in SEQ ID NO:193 (as set forth in FIG. 19) corresponding to a structurally-related modified amino acid position within the 3-dimensional structure of an above-described IFN-α2b polypeptide variant, where the replacement(s) lead to greater resistance to proteases, as assessed by incubation with a protease or with a blood lysate or by incubation with serum (as described above), compared to the unmodified IFN-αH. In some of these embodiments, the modified IFN-αH is selected from among proteins comprising one or more single amino acid replacements at one or more target positions in SEQ ID NO:193 (as set forth in FIG. 19), corresponding to any of amino-acid positions: 41, 59, 79, 108, 118, 126, 138 and 160, or to any of amino acid positions: 27, 33, 41, 59, 79, 90, 108, 110, 111, 112, 114, 118, 122, 126, 138, and 160; where the variant further comprises an amino acid sequence that differs from the amino acid sequence of the parent polypeptide to the extent that the variant comprises one or more glycosylation sites not found in the parent polypeptide.

[0529] In some embodiments, any of the above-described hyperglycosylated, protease-resistant IFN-αH variants has increased stability compared to the unmodified (parent) cytokine, where the stability is assessed by measuring residual biological activity after incubation with either a mixture of proteases, individual proteases, blood lysate, or serum, as described above. In other embodiments, any of the above-described hyperglycosylated, protease-resistant IFN-αH variants has increased biological activity compared to the unmodified (parent) cytokine, after incubation with either a mixture of proteases, individual proteases, blood lysate, or serum, as described above.

[0530] In other embodiments, the hyperglycosylated, protease-resistant IFN-α variant is a modified IFN-αF cytokine, comprising one or more amino acid replacements at one or more target positions in SEQ ID NO:194 (as set forth in FIG. 20) corresponding to a structurally-related modified amino acid position within the 3-dimensional structure of an above-described IFN-α2b polypeptide variant, where the replacement(s) lead to greater resistance to proteases, as assessed by incubation with a protease or with a blood lysate or by incubation with serum (as described above), compared to the unmodified IFN-αF. In some of these embodiments, the modified IFN-αF is selected from among proteins comprising one or more single amino acid replacements at one or more target positions in SEQ ID NO: 194 (as set forth in FIG. 20), corresponding to any of amino acid positions: 41, 59, 79, 108, 118, 126, 138 and 160, or to any of amino acid positions: 27, 33, 41, 59, 79, 90, 108, 110, 111, 112, 114, 118, 122, 126, 138, and 160; where the variant further comprises an amino acid sequence that differs from the amino acid sequence of the parent polypeptide to the extent that the variant comprises one or more glycosylation sites not found in the parent polypeptide.

[0531] In some embodiments, any of the above-described hyperglycosylated, protease-resistant IFN-αF variants has increased stability compared to the unmodified (parent) cytokine, where the stability is assessed by measuring residual biological activity after incubation with either a mixture of proteases, individual proteases, blood lysate, or serum, as described above. In other embodiments, any of the above-described hyperglycosylated, protease-resistant IFN-αF variants has increased biological activity compared to the unmodified (parent) cytokine, after incubation with either a mixture of proteases, individual proteases, blood lysate, or serum, as described above.

[0532] In other embodiments, the hyperglycosylated, protease-resistant IFN-α variant is a modified IFN-α8 cytokine, comprising one or more amino acid replacements at one or more target positions in SEQ ID NO:195 (as set forth in FIG. 21) corresponding to a structurally-related modified amino acid position within the 3-dimensional structure of an above-described IFN-α2b polypeptide variant, where the replacement(s) lead to greater resistance to proteases, as assessed by incubation with a protease or with a blood lysate or by incubation with serum (as described above), compared to the unmodified IFN-α8. In some of these embodiments, the modified IFN-α8 is selected from among proteins comprising one or more single amino acid replacements at one or more target positions in SEQ ID NO: 195 (as set forth in FIG. 21), corresponding to any of amino acid positions: 41, 59, 79, 108, 118, 126, 138 and 160, or to any of amino acid positions: 27, 33, 41, 59, 79, 90, 108, 110, 111, 112, 114, 118, 122, 126, 138, and 160; where the variant further comprises an amino acid sequence that differs from the amino acid sequence of the parent polypeptide to the extent that the variant comprises one or more glycosylation sites not found in the parent polypeptide.

[0533] In some embodiments, any of the above-described hyperglycosylated, protease-resistant IFN-α8 variants has increased stability compared to the unmodified (parent) cytokine, where the stability is assessed by measuring residual biological activity after incubation with either a mixture of proteases, individual proteases, blood lysate, or serum, as described above. In other embodiments, any of the above-described hyperglycosylated, protease-resistant IFN-α8 variants has increased biological activity compared to the unmodified (parent) cytokine, after incubation with either a mixture of proteases, individual proteases, blood lysate, or serum, as described above.

Consensus IFN-α Polypeptide Variants

[0534] In other embodiments, the hyperglycosylated, protease-resistant IFN-α variant is a modified consensus IFN-α cytokine, comprising one or more amino acid replacements at one or more target positions in SEQ ID NO:232 (as set forth in FIG. 9) corresponding to a structurally-related modified amino acid position within the 3-dimensional structure of an above-described IFN-α2b polypeptide variant, where the replacement(s) lead to greater resistance to proteases, as assessed by incubation with a protease or with a blood lysate or by incubation with serum (as described above), compared to the unmodified consensus IFN-α. In some of these embodiments, the modified consensus IFN-α is selected from among proteins comprising one or more single amino acid replacements at one or more target positions in SEQ ID NO: 232 (as set forth in FIG. 9), corresponding to any of amino acid positions: 42, 59, 79, 108, 118, 126, 134 and 160, or to any of amino acid positions: 27, 33, 42, 60, 80, 91, 109, 111, 112, 113, 115, 119, 123, 127, 135, and 161; where the variant further comprises an amino acid sequence that differs from the amino acid sequence of the parent polypeptide to the extent that the variant comprises one or more glycosylation sites not found in the parent polypeptide.

[0535] In some embodiments, any of the above-described consensus IFN-α variants is an [D102N]interferon alfacon-1 glycopeptide, where the [D102N]interferon alfacon-1 glycopeptide is a variant of the interferon alfacon-1 polypeptide having (a) an asparagine residue substituted for the native aspartic acid residue at amino acid position 102 in the amino acid sequence of Infergen (interferon alfacon-1) corresponds to the native aspartic acid residue at amino acid position 99 depicted in FIG. 24 (where the amino acid position is as set forth in FIG. 24; and where D99 in FIG. 24 corresponds to D72 in FIG. 9); and (b) a carbohydrate moiety covalently attached to the R-group of said asparagine residue.

[0536] In some embodiments, any of the above-described consensus IFN-α variants is an [D102N, D108N]interferon alfacon-1 glycopeptide, where the [D102N, D108N]interferon alfacon-1 glycopeptide is a variant of the interferon alfacon-1 polypeptide having (a) an asparagine residue substituted for each of the native aspartic acid residues at amino acid positions 102 and 108 in the amino acid sequence of Infergen corresponding to the native aspartic acid residues at amino acid positions 99 and 105, respectively, depicted in FIG. 24 (where the amino acid positions are as set forth in FIG. 24; and where D99 and D105 in FIG. 24 correspond to D72 and D78, respectively, in FIG. 9); and (b) a carbohydrate moiety covalently attached to the R-group of each of said asparagine residues.

[0537] In some embodiments, any of the above-described consensus IFN-α variants is an [D102N, D108N, E138N]interferon alfacon-1 glycopeptide, where the [D102N, D108N, E138N]interferon alfacon-1 glycopeptide is a variant of the interferon alfacon-1 polypeptide having (a) an asparagine residue substituted for each of the native aspartic acid, aspartic acid, and glutamic acid residues at amino acid positions 102, 108 and 138, corresponding to the native aspartic acid, aspartic acid, and glutamic acid residues at amino acid positions 99, 105, and 134, respectively, in the amino acid sequence of Infergen depicted in FIG. 24 (where the amino acid positions are as set forth in FIG. 24; and where D99, D105, and E134 in FIG. 24 correspond to D72, D78, and E107, respectively, in FIG. 9); and (b) a carbohydrate moiety covalently attached to the R-group of each of said asparagine residues.

[0538] In some embodiments, any of the above-described consensus IFN-α variants is an [D102N, E138N]interferon alfacon-1 glycopeptide, where the [D102N, E138N] interferon alfacon-1 glycopeptide is a variant of the interferon alfacon-1 polypeptide having (a) an asparagine residue substituted for each of the native aspartic acid and glutamic acid residues at amino acid positions 102 and 138, corresponding to the native aspartic acid residue at amino acid position 99 and the native glutamic acid residue at amino acid position 134, respectively, in the amino acid sequence of Infergen depicted in FIG. 24 (where the amino acid positions are as set forth in FIG. 24; and where D99 and E134 in FIG. 24 correspond to D72 and E107, respectively, in FIG. 9); and (b) a carbohydrate moiety covalently attached to the R-group of each of said asparagine residues.

[0539] In some embodiments, any of the above-described consensus IFN-α variants is an [D108N, E138N]interferon alfacon-1 glycopeptide, where the [D108N, E138N] interferon alfacon-1 glycopeptide is a variant of the interferon alfacon-1 polypeptide having (a) an asparagine residue substituted for each of the native aspartic acid and glutamic acid residues at amino acid positions 108 and 138, corresponding to the native aspartic acid residues at amino acid positions 105 and the native glutamic acid residue at position 134, respectively, in the amino acid sequence of Infergen depicted in FIG. 24 (where the amino acid positions are as set forth in FIG. 24; and where D105 and E134 in FIG. 24 correspond to D78 and E107, respectively, in FIG. 9); and (b) a carbohydrate moiety covalently attached to the R-group of each of said asparagine residues.

[0540] In some embodiments, any of the above-described consensus IFN-α variants is an [D102N, D108N, E138T]interferon alfacon-1 glycopeptide, where the [D102N, D108N, E138T]interferon alfacon-1 glycopeptide is a variant of the interferon alfacon-1 polypeptide having (a) an asparagine residue substituted for each of the native aspartic acid residues at amino acid positions 102 and 108 in the amino acid sequence of Infergen corresponding to the native aspartic acid residues at amino acid positions 99 and 105 depicted in FIG. 24 (b) a threonine residue substituted for the native glutamic acid residue at amino acid position 138 in the amino acid sequence of Infergen corresponding to the native glutamic acid residue at amino acid position 134 depicted in FIG. 24 (where the amino acid positions are as set forth in FIG. 24; and where D99, D105, and E134 in FIG. 24 correspond to D72, D78, and E107, respectively, in FIG. 9); and (c) a carbohydrate moiety covalently attached to the R-group of each of said asparagine and threonine residues.

[0541] In some embodiments, any of the above-described consensus IFN-α variants is an [D102N, E138T]interferon alfacon-1 glycopeptide, where the [D102N, E138T]interferon alfacon-1 glycopeptide is a variant of the interferon alfacon-1 polypeptide having (a) an asparagine residue substituted for the native aspartic acid residue at amino acid position 102 in the amino acid sequence of Infergen corresponding to the native aspartic acid residue at amino acid positions 99 depicted in FIG. 24 (b) a threonine residue substituted for the native glutamic acid residue at amino acid position 138 in the amino acid sequence of Infergen corresponds to the native glutamic acid residue at amino acid position 134 depicted in FIG. 24 (where the amino acid positions are as set forth in FIG. 24; and where D99 and E134 in FIG. 24 correspond to D72 and E107, respectively, in FIG. 9); and (c) a carbohydrate moiety covalently attached to the R-group of each of said asparagine and threonine residues.

[0542] In some embodiments, any of the above-described consensus IFN-α variants is an [D108N, E138T]interferon alfacon-1 glycopeptide, where the [D108N, E138T]interferon alfacon-1 glycopeptide is a variant of the interferon alfacon-1 polypeptide having (a) an asparagine residue substituted for the native aspartic acid residue at amino acid position 108 in the amino acid sequence of Infergen corresponding to the native aspartic acid residue at amino acid positions 105 depicted in FIG. 24 (b) a threonine residue substituted for the native glutamic acid residue at amino acid position 138 in the amino acid sequence of Infergen corresponding to the native glutamic acid residue at amino acid position 134 depicted in FIG. 24 (where the amino acid positions are as set forth in FIG. 24; and where D105 and E134 in FIG. 24 correspond to D78 and E107, respectively, in FIG. 9); and (c) a carbohydrate moiety covalently attached to the R-group of each of said asparagine and threonine residues.

Hybrid Type I Interferon Receptor Polypeptide Agonists

[0543] As used herein, a “hybrid Type I interferon receptor polypeptide agonist” is a polypeptide having an amino acid sequence comprising discrete sub-sequences corresponding in amino acid identity and number to sub-sequences of different, naturally occurring Type I interferon receptor polypeptide agonists, wherein the amino acid sequence of the subject polypeptide agonist differs from that of any naturally-occurring Type I interferon receptor polypeptide agonist. In some embodiments, the polypeptide variant is composed of discrete sub-sequences selected from IFN-α2b, IFN-α14, IFN-β1, and IFN-ω, and the amino acid sequence of the polypeptide variant agonist differs from the amino acid sequences of IFN-α2b, IFN-α14, IFN-β1, and IFN-α. In other embodiments, the polypeptide variant is composed of discrete sub-sequences selected from IFN-α2b, IFN-α14, IFN-β1, Infergen® consensus IFN-α, and IFN-ω, and the amino acid sequence of polypeptide variant differs from the amino acid sequences of IFN-α2b, IFN-α14, IFN-β1, Infergen® consensus IFN-α, and IFN-ω.

[0544] Suitable protease-resistant or protease-resistant, hyperglycosylated polypeptide variants include protease-resistant or protease-resistant, hyperglycosylated forms of any parent hybrid Type I interferon receptor polypeptide agonist. In one aspect, a protease-resistant or protease-resistant, hyperglycosylated variant of a parent hybrid Type I interferon receptor polypeptide agonist has an amino acid sequence that differs from the amino acid sequence of the parent polypeptide to the extent that the variant comprises one or more glycosylation sites not found in the parent polypeptide; and comprises at least one mutated protease cleavage site in place of a native protease cleavage site found in the parent polypeptide.

[0545] In one aspect, the parent hybrid Type I interferon receptor polypeptide agonist is [D102N]IFN-α2a glycopeptide, where the [D102N]IFN-α2a glycopeptide is a variant of IFN-α2a having an asparagine residue in place of the native aspartic acid residue at amino acid position 102 in the amino acid sequence of IFN-α2a; and the hyperglycosylated or protease-resistant, hyperglycosylated polypeptide variant of the parent polypeptide is a [D102N, D108N]IFN-α2a glycopeptide, where [D102N, D108N]IFN-α2a glycopeptide is a variant of IFN-α2a having (a) an asparagine residue in place of the native aspartic acid residue at each of amino acid positions 102 and 108 in the amino acid sequence of IFN-α2a (where the D102 and D105 amino acid positions correspond to the D99 and D105 positions as set forth in FIG. 24; and correspond to D71 and D77, respectively, of the amino acid sequence of IFN-α2a set forth in FIG. 1); and (b) a carbohydrate moiety covalently attached to the R-group of each of said asparagine residues; and comprises at least one mutated protease cleavage site in place of a native protease cleavage site found in the parent polypeptide. It will be appreciated that the amino acid sequence of IFN-α2a is the same as the amino acid sequence of IFN-α2b depicted in FIG. 24, provided that the IFN-α2a sequence has a lysine residue in place of the arginine residue at amino acid position 50 in the IFN-α2b sequence shown in FIG. 24 (corresponding to R50 of the IFN-α2b sequence set forth in FIG. 2).

[0546] In another aspect, the parent hybrid Type I interferon receptor polypeptide agonist is [D102N]IFN-α2b glycopeptide, where the [D102N]IFN-α2b glycopeptide is a variant of IFN-α2b having an asparagine residue in place of the native aspartic acid residue at amino acid position 102 in the amino acid sequence of IFN-α2b corresponding to the native aspartic acid residue at amino acid position 99 in the amino acid sequence depicted in FIG. 24; and the hyperglycosylated or protease-resistant, hyperglycosylated polypeptide variant of the parent polypeptide is a [D102N, D108N]IFN-α2b glycopeptide, where the [D102N, D108N]IFN-α2b glycopeptide is a variant of IFN-α2b having (a) an asparagine residue in place of the native aspartic acid residue at each of amino acid positions 102 and 108 in the amino acid sequence of IFN-α2b corresponding to the native aspartic acid residues at amino acid positions 99 and 105 in the amino acid sequence depicted in FIG. 24 (where the D99 and D105 amino acid positions are as set forth in FIG. 24; and corresponds to D71 and D77, respectively, of the amino acid sequence of IFN-α2b set forth in FIG. 2); and (b) a carbohydrate moiety covalently attached to the R-group of each of said asparagine residues; and comprises at least one mutated protease cleavage site in place of a native protease cleavage site found in the parent polypeptide.

[0547] In another aspect, the parent hybrid Type I interferon receptor polypeptide agonist is the interferon alfacon-1 polypeptide; and the hyperglycosylated or protease-resistant, hyperglycosylated polypeptide variant of the parent polypeptide is an [D102N]interferon alfacon-1 glycopeptide, where the [D102N]interferon alfacon-1 glycopeptide is a variant of the interferon alfacon-1 polypeptide having (a) an asparagine residue substituted for the native aspartic acid residue at amino acid position 102 corresponding to the native aspartic acid residue at amino acid position 99 in the amino acid sequence of Infergen depicted in FIG. 24 (where the D99 amino acid position is as set forth in FIG. 24; and corresponds to D72 of the amino acid sequence of consensus IFN-α set forth in FIG. 9); and (b) a carbohydrate moiety covalently attached to the R-group of said asparagine residue; and comprises at least one mutated protease cleavage site in place of a native protease cleavage site found in the parent polypeptide.

[0548] In another aspect, the parent hybrid Type I interferon receptor polypeptide agonist is the interferon alfacon-1 polypeptide; and the protease-resistant or protease-resistant, hyperglycosylated polypeptide variant of the parent polypeptide is an [D 102N, D108N]interferon alfacon-1 glycopeptide, where the [D102N, D108N]interferon alfacon-1 glycopeptide is a variant of the interferon alfacon-1 polypeptide having (a) an asparagine residue substituted for each of the native aspartic acid residues at amino acid positions 102 and 108 in the amino acid sequence of Infergen corresponding to the native aspartic acid residues at amino acid positions 99 and 105 depicted in FIG. 24 (where the D99 and D105 amino acid positions are as set forth in FIG. 24; and correspond to D72 and D78, respectively, of the amino acid sequence of consensus IFN-α set forth in FIG. 9); and (b) a carbohydrate moiety covalently attached to the R-group of each of said asparagine residues; and comprises at least one mutated protease cleavage site in place of a native protease cleavage site found in the parent polypeptide.

[0549] In another aspect, the parent hybrid Type I interferon receptor polypeptide agonist is the interferon alfacon-1 polypeptide; and the protease-resistant or protease-resistant, hyperglycosylated polypeptide variant of the parent polypeptide is an [D102N, D108N, E138N]interferon alfacon-1 glycopeptide, where the [D102N, D108N, E138N]interferon alfacon-1 glycopeptide is a variant of the interferon alfacon-1 polypeptide having (a) an asparagine residue substituted for each of the native aspartic acid, aspartic acid, and glutamic acid residues at amino acid positions 102, 108 and 138, respectively, in the amino acid sequence of Infergen corresponding to the native aspartic acid residues at amino acid positions 99 and 105 and to the native glutamic acid residue at amino acid position 134 depicted in FIG. 24 (where the D99, D105, and E134 amino acid positions are as set forth in FIG. 24; and correspond to D72, D78, and E107, respectively, of the amino acid sequence of consensus IFN-α set forth in FIG. 9); and (b) a carbohydrate moiety covalently attached to the R-group of each of said asparagine residues; and comprises at least one mutated protease cleavage site in place of a native protease cleavage site found in the parent polypeptide.

[0550] In another aspect, the parent hybrid Type I interferon receptor polypeptide agonist is the interferon alfacon-1 polypeptide; and the protease-resistant or protease-resistant, hyperglycosylated polypeptide variant of the parent polypeptide is an [D102N, E138N] interferon alfacon-1 glycopeptide, where the [D102N, E138N] interferon alfacon-1 glycopeptide is a variant of the interferon alfacon-1 polypeptide having (a) an asparagine residue substituted for each of the native aspartic acid and glutamic acid residues at amino acid positions 102 and 138, respectively, in the amino acid sequence of Infergen corresponding to the native aspartic acid residue at amino acid position 99 and the native glutamic acid residue at position 134 depicted in FIG. 24 (where the D99 and E134 amino acid positions are as set forth in FIG. 24; and correspond to D72 and E107, respectively, of the amino acid sequence of consensus IFN-α set forth in FIG. 9); and (b) a carbohydrate moiety covalently attached to the R-group of each of said asparagine residues; and comprises at least one mutated protease cleavage site in place of a native protease cleavage site found in the parent polypeptide.

[0551] In another aspect, the parent hybrid Type I interferon receptor polypeptide agonist is the interferon alfacon-1 polypeptide; and the protease-resistant or protease-resistant, hyperglycosylated polypeptide variant of the parent polypeptide is an [D108N, E138N] interferon alfacon-1 glycopeptide, where the [D108N, E138N] interferon alfacon-1 glycopeptide is a variant of the interferon alfacon-1 polypeptide having (a) an asparagine residue substituted for each of the native aspartic acid and glutamic acid residues at amino acid positions 108 and 138, respectively, in the amino acid sequence of Infergen corresponding to the native aspartic acid residue at amino acid position 105 and native glutamic acid resiude at amino acid position 134 depicted in FIG. 24 (where the D105 and E134 amino acid positions are as set forth in FIG. 24; and correspond to D78 and E107, respectively, of the amino acid sequence of consensus IFN-α set forth in FIG. 9); and (b) a carbohydrate moiety covalently attached to the R-group of each of said asparagine residues; and comprises at least one mutated protease cleavage site in place of a native protease cleavage site found in the parent polypeptide.

[0552] In another aspect, the parent hybrid Type I interferon receptor polypeptide agonist is the interferon alfacon-1 polypeptide; and the protease-resistant or protease-resistant, hyperglycosylated polypeptide variant of the parent polypeptide is an [D102N, D108N, E138T]interferon alfacon-1 glycopeptide, where the [D102N, D108N, E138T]interferon alfacon-1 glycopeptide is a variant of the interferon alfacon-1 polypeptide having (a) an asparagine residue substituted for each of the native aspartic acid residues at amino acid positions 102 and 108 in the amino acid sequence of Infergen corresponding to the native aspartic acid residues at amino acid positions 99 and 105 depicted in FIG. 24; (b) a threonine residue substituted for the native glutamic acid residue at amino acid position 138 in the amino acid sequence of Infergen corresponding to the native glutamic acid residue at amino acid position 134 depicted in FIG. 24 (where the D99, D105, and E134 amino acid positions are as set forth in FIG. 24; and correspond to D72, D78, and E107, respectively, of the amino acid sequence of consensus IFN-α set forth in FIG. 9); and (c) a carbohydrate moiety covalently attached to the R-group of each of said asparagine and threonine residues; and comprises at least one mutated protease cleavage site in place of a native protease cleavage site found in the parent polypeptide.

[0553] In another aspect, the parent hybrid Type I interferon receptor polypeptide agonist is the interferon alfacon-1 polypeptide; and the protease-resistant or protease-resistant, hyperglycosylated polypeptide variant of the parent polypeptide is an [D102N, E138T]interferon alfacon-1 glycopeptide, where the [D102N, E138T]interferon alfacon-1 glycopeptide is a variant of the interferon alfacon-1 polypeptide having (a) an asparagine residue substituted for the native aspartic acid residue at amino acid position 102 in the amino acid sequence of Infergen corresponding to the native aspartic acid residue at amino acid position 99 depicted in FIG. 24; (b) a threonine residue substituted for the native glutamic acid residue at amino acid position 138 in the amino acid sequence of Infergen corresponding to the native glutamic acid residue at amino acid position 134 depicted in FIG. 24 (where the D99 and E134 amino acid positions are as set forth in FIG. 24; and correspond to D72 and E107, respectively, of the amino acid sequence of consensus IFN-α set forth in FIG. 9); and (c) a carbohydrate moiety covalently attached to the R-group of each of said asparagine and threonine residues; and comprises at least one mutated protease cleavage site in place of a native protease cleavage site found in the parent polypeptide.

[0554] In another aspect, the parent hybrid Type I interferon receptor polypeptide agonist is the interferon alfacon-1 polypeptide; and the protease-resistant or protease-resistant, hyperglycosylated polypeptide variant is an [D108N, E138T]interferon alfacon-1 glycopeptide, where the [D108N, E138T]interferon alfacon-1 glycopeptide is a variant of the interferon alfacon-1 polypeptide having (a) an asparagine residue substituted for the native aspartic acid residue at amino acid position 108 in the amino acid sequence of Infergen corresponding to the native aspartic acid residue at amino acid position 105 depicted in FIG. 24; (b) a threonine residue substituted for the native glutamic acid residue at amino acid position 138 in the amino acid sequence of Infergen corresponding to the native glutamic acid residue at amino acid position 134 depicted in FIG. 24 (where the D105 and E134 amino acid positions are as set forth in FIG. 24; and correspond to D78 and E107, respectively, of the amino acid sequence of consensus IFN-α set forth in FIG. 9); and (c) a carbohydrate moiety covalently attached to the R-group of each of said asparagine and threonine residues; and comprises at least one mutated protease cleavage site in place of a native protease cleavage site found in the parent polypeptide.

[0555] In another aspect, the parent hybrid Type I interferon receptor polypeptide agonist is the “majority” consensus Type I interferon amino acid sequence depicted in FIG. 24; and the hypeglycosylated or protease-resistant, hyperglycosylated polypeptide variant of the parent polypeptide is a [D102N]“majority” consensus Type I interferon glycopeptide, where the [D102N]“majority” consensus Type I interferon glycopeptide is the “majority” amino acid sequence depicted in FIG. 24 having (a) an asparagine residue substituted for the native aspartic acid residue at amino acid position 102 corresponding to the native aspartic acid residue at amino acid position 99 in the “majority” amino acid sequence and (b) a carbohydrate moiety covalently attached to the R-group of said asparagine residue; and comprises at least one mutated protease cleavage site in place of a native protease cleavage site found in the parent polypeptide.

[0556] In another aspect, the parent hybrid Type I interferon receptor polypeptide agonist is the “majority” consensus Type I interferon amino acid sequence depicted in FIG. 24; and the hyperglycosylated or protease-resistant, hyperglycosylated polypeptide variant of the parent polypeptide is a [D102N, D108N]“majority” consensus Type I interferon glycopeptide, where the [D102N, D108N]“majority” consensus Type I interferon glycopeptide is the “majority” amino acid sequence depicted in FIG. 24 having (a) an asparagine residue substituted for each of the native aspartic acid residues at amino acid positions 102 and 108 corresponding to the native aspartic acid residues at amino acid positions 99 and 105 in the “majority” amino acid sequence and (b) a carbohydrate moiety covalently attached to the R-group of each of said asparagine residues; and comprises at least one mutated protease cleavage site in place of a native protease cleavage site found in the parent polypeptide.

[0557] In another aspect, the parent hybrid Type I interferon receptor polypeptide agonist is the “majority” consensus Type I interferon amino acid sequence depicted in FIG. 24; and the hyperglycosylated or protease-resistant, hyperglycosylated polypeptide variant of the parent polypeptide is a [D102N, D108N, E138N]“majority” consensus Type I interferon glycopeptide, where the [D102N, D108N, E138N]“majority” consensus Type I interferon glycopeptide is the “majority” amino acid sequence depicted in FIG. 24 having (a) an asparagine residue substituted for each of the native aspartic acid, aspartic acid, and glutamic acid residues at amino acid positions 102, 108 and 138, corresponding to the native aspartic acid residues at amino acid positions 99 and 105 and the native glutamic acid residue at amino acid position 134 respectively, in the “majority” amino acid sequence and (b) a carbohydrate moiety covalently attached to the R-group of each of said asparagine residues; and comprises at least one mutated protease cleavage site in place of a native protease cleavage site found in the parent polypeptide.

[0558] In another aspect, the parent hybrid Type I interferon receptor polypeptide agonist is the “majority” consensus Type I interferon amino acid sequence depicted in FIG. 24; and the hyperglycosylated or protease-resistant, hyperglycosylated polypeptide variant of the parent polypeptide is a [D102N, E138N]“majority” consensus Type I interferon glycopeptide, where the [D102N, E138N]“majority” consensus Type I interferon glycopeptide is the “majority” amino acid sequence depicted in FIG. 24 having (a) an asparagine residue substituted for each of the native aspartic acid and glutamic acid residues at amino acid positions 102 and 138, corresponding to the native aspartic acid residue at amino acid position 99 and the native glutamic acid residue at position 134 respectively, in the “majority” amino acid sequence (where the amino acid positions are as set forth in FIG. 24); and (b) a carbohydrate moiety covalently attached to the R-group of each of said asparagine residues; and comprises at least one mutated protease cleavage site in place of a native protease cleavage site found in the parent polypeptide.

[0559] In another aspect, the parent hybrid Type I interferon receptor polypeptide agonist is the “majority” consensus Type I interferon amino acid sequence depicted in FIG. 24; and the hyperglycosylated or protease-resistant, hyperglycosylated polypeptide variant of the parent polypeptide is a [D108N, E138N]“majority” consensus Type I interferon glycopeptide, where the [D108N, E138N]“majority” consensus Type I interferon glycopeptide is the “majority” amino acid sequence depicted in FIG. 24 having (a) an asparagine residue substituted for each of the native aspartic acid and glutamic acid residues at amino acid positions 108 and 138, corresponding to the native aspartic acid residue at amino acid position 105 and the native glutamic acid residue at position 134 respectively, in the “majority” amino acid sequence (where the amino acid positions are as set forth in FIG. 24); and (b) a carbohydrate moiety covalently attached to the R-group of each of said asparagine residues; and comprises at least one mutated protease cleavage site in place of a native protease cleavage site found in the parent polypeptide.

[0560] In another aspect, the parent hybrid Type I interferon receptor polypeptide agonist is the “majority” consensus Type I interferon amino acid sequence depicted in FIG. 24; and the hyperglycosylated or protease-resistant, hyperglycosylated polypeptide variant of the parent polypeptide is a [D102N, D108N, E138T]“majority” consensus Type I interferon glycopeptide, where the [D102N, D108N, E138T]“majority” consensus Type I interferon glycopeptide is the “majority” amino acid sequence depicted in FIG. 24 having (a) an asparagine residue substituted for each of the native aspartic acid residues at amino acid positions 102 and 108 corresponding to the native aspartic acid residues at amino acid positions 99 and 105 in the “majority” amino acid sequence (b) a threonine residue substituted for the native glutamic acid residue at amino acid position 138 corresponding to the native glutamic acid residue at position 134 in the “majority” amino acid sequence and (c) a carbohydrate moiety covalently attached to the R-group of each of said asparagine and threonine residues; and comprises at least one mutated protease cleavage site in place of a native protease cleavage site found in the parent polypeptide.

[0561] In another aspect, the parent hybrid Type I interferon receptor polypeptide agonist is the “majority” consensus Type I interferon amino acid sequence depicted in FIG. 24; and the hyperglycosylated or protease-resistant, hyperglycosylated polypeptide variant of the parent polypeptide is a [D102N, E138T]“majority” consensus Type I interferon glycopeptide, where the [D102N, E138T]“majority” consensus Type I interferon glycopeptide is the “majority” amino acid sequence depicted in FIG. 24 having (a) an asparagine residue substituted for the native aspartic acid residue at amino acid position 102 corresponding to the native aspartic acid residue at amino acid position 99 in the “majority” amino acid sequence (b) a threonine residue substituted for the native glutamic acid residue at amino acid position 138 corresponding to the native glutamic acid residue at position 134 in the “majority” amino acid sequence and (c) a carbohydrate moiety covalently attached to the R-group of each of said asparagine and threonine residues; and comprises at least one mutated protease cleavage site in place of a native protease cleavage site found in the parent polypeptide.

[0562] In another aspect, the parent hybrid Type I interferon receptor polypeptide agonist is the “majority” consensus Type I interferon amino acid sequence depicted in FIG. 24; and the hyperglycosylated or protease-resistant, hyperglycosylated polypeptide variant of the parent polypeptide is a [D108N, E138T]“majority” consensus Type I interferon glycopeptide, where the [D108N, E138T]“majority” consensus Type I interferon glycopeptide is the “majority” amino acid sequence depicted in FIG. 24 having (a) an asparagine residue substituted for the native aspartic acid residue at amino acid position 108 corresponding to the native aspartic acid residue at amino acid position 105 in the “majority” amino acid sequence (b) a threonine residue substituted for the native glutamic acid residue at amino acid position 138 corresponding to the native glutamic acid residue at position 134 in the “majority” amino acid sequence (where the amino acid positions are as set forth in FIG. 24); and (c) a carbohydrate moiety covalently attached to the R-group of each of said asparagine and threonine residues; and comprises at least one mutated protease cleavage site in place of a native protease cleavage site found in the parent polypeptide.

[0563] The numbering of amino acid replacements (discussed in the context of generating hyperglycosylation variants of the parent protein therapeutic) used to describe the hyperglycosylated or protease-resistant, hyperglycosylated polypeptide variants of parent hybrid Type I receptor polypeptide agonists herein coincides with the numbering of amino acids used to depict the Type I interferon amino acid sequences as described above and corresponds to the sequence numbering appearing in FIG. 24. Thus, position 102 in the variant [D102N]interferon α2b polypeptide described by SEQ ID No.:1440 corresponds to position 99 as set forth in FIG. 24.

[0564] In another aspect, a hyperglycosylated or protease-resistant, hyperglycosylated polypeptide variant of a parent hybrid Type I interferon receptor polypeptide agonist therapeutic differs from the parent hybrid Type I interferon receptor polypeptide agonist therapeutic to the extent that the hyperglycosylated or protease-resistant, hyperglycosylated polypeptide variant comprises (1) a carbohydrate moiety covalently attached to a non-native glycosylation site not found in the parent hybrid Type I interferon receptor polypeptide agonist therapeutic and/or (2) a carbohydrate moiety covalently attached to a native glycosylation site found but not glycosylated in the parent hybrid Type I interferon receptor polypeptide agonist therapeutic.

[0565] In some embodiments, any of the above-described hyperglycosylated, protease-resistant consensus IFN-α variants has increased stability compared to the unmodified (parent) cytokine, where the stability is assessed by measuring residual biological activity after incubation with either a mixture of proteases, individual proteases, blood lysate, or serum, as described above. In other embodiments, any of the above-described hyperglycosylated, protease-resistant consensus IFN-α variants has increased biological activity compared to the unmodified (parent) cytokine, after incubation with either a mixture of proteases, individual proteases, blood lysate, or serum, as described above.

IFN-β Polypeptide Variants

[0566] In some embodiments, a protease-resistant or protease-resistant, hyperglycosylated cytokine variant is an IFN-β variant. In some embodiments, the protease-resistant or protease-resistant, hyperglycosylated IFN-β variant comprises one or more single amino acid replacements in SEQ ID NO:197 (or the amino acid sequence as set forth in FIG. 3), corresponding to the replacement of one or more of: M by V at position 1, M by I at position 1, M by T at position 1, M by Q at position 1, M by A at position 1, L by V at position 5, L by I at position 5, L by T at position 5, L by Q at position 5, L by H at position 5, L by A at position 5, F by I at position 8, F by V at position 8, L by V at position 9, L by I at position 9, L by T at position 9, L by Q at position 9, L by H at position 9, L by A at position 9, R by H at position 11, R by Q at position 11, F by I at position 15, F by V at position 15, K by Q at position 19, K by T at position 19, K by S at position 19, K by H at position 19, W by S at position 22, W by H at position 22, N by H at position 25, N by S at position 25, N by Q at position 25, R by H position 27, R by Q position 27, L by V at position 28, L by I at position 28, L by T at position 28, L by Q at position 28, L by H at position 28, L by A at position 28, E by Q at position 29, E by H at position 29, Y by H at position 30, Y by I at position 30, L by V at position 32, L by I at position 32, L by T at position 32, L by Q at position 32, L by H at position 32, L by A at position 32, K by Q at position 33, K by T at position 33, K by S at position 33, K by H at position 33, R by H at position 35, R by Q at position 35, M by V at position 36, M by I at position 36, M by T at position 36, M by Q at position 36, M by A at position 36, D by Q at position 39, D by H at position 39, D by G at position 39, E by Q at position 42, E by H at position 42, K by Q at position 45, K by T at position 45, K by S at position 45, K by H at position 45, L by V at position 47, L by I at position 47, L by T at position 47, L by, Q at position 47, L by H at position 47, L by A at position 47, K by Q at position 52, K by T at position 52, K by S at position 52, K by H at position 52, F by I at position 67, F by V at position 67, R by H at position 71, R by Q at position 71, D by Q at position 73, D by H at position 73, D by G at position 73, E by Q at position 81, E by H at position 81, E by Q at position 85, E by H at position 85, Y by H at position 92, Y by I at position 92, K by Q at position 102, K by T at position 102, K by S at position 102, K by H at position 102, E by Q at position 103, E by H at position 103, E by Q at position 104, E by H at position 104, K by Q at position 105, K by T at position 105, K by S at position 105, K by H at position 105, E by Q at position 107, E by H at position 107, K by Q at position 108, K by T at position 108, K by S at position 108, K by H at position 108, E by Q at position 109, E by H at position 109, D by Q at position 110, D by H at position 110, D by G at position 110, F by I at position 111, F by V at position 111, R by H at position 113, R by Q at position 113, L by V at position 116, L by I at position 116, L by T at position 116, L by Q at position 116, L by H at position 116, L by A at position 116, L by V at position 120, L by I at position 120, L by T at position 120, L by Q at position 120, L by H at position 120, L by A at position 120, K by Q at position 123, K by T at position 123, K by S at position 123, K by H at position 123, R by H at position 124, R by Q at position 124, R by H at position 128, R by Q at position 128, L by V at position 130, L by I at position 130, L by T at position 130, L by Q at position 130, L by H at position 130, L by A at position 130, K by Q at position 138, K by T at position 138, K by S at position 138, K by H at position 138, K by Q at position 136, K by T at position 136, K by S at position 136, K by H at position 136, E by Q at position 137, E by H at position 137, Y by H at position 138, Y by I at position 138, R by H at position 152, R by Q at position 152, Y by H at position 155, Y by I at position 155, R by H at position 159, R by Q at position 159, Y by H at position 163, Y by I at position 163, R by H at position 165, R by Q at position 165, M by D at position 1, M by E at position 1, M by K at position 1, M by N at position 1, M by R at position 1, M by S at position 1, L by D at position 5, L by E at position 5, L by K at position 5, L by N at position 5, L by R at position 5, L by S at position 5, L by D at position 6, L by E at position 6, L by K at position 6, L by N at position 6, L by R at position 6, L by S at position 6, L by Q at position 6, L by T at position 6, F by E at position 8, F by K at position 8, F by R at position 8, F by D at position 8, L by D at position 9, L by E at position 9, L by K at position 9, L by N at position 9, L by R at position 9, L by S at position 9, Q by D at position 10, Q by E at position 10, Q by K at position 10, Q by N at position 10, Q by R at position 10, Q by S at position 10, Q by T at position 10, S by D at position 12, S by E at position 12, S by K at position 12, S by R at position 12, S by D at position 13, S by E at position 13, S by K at position 13, S by R at position 13, S by N at position 13, S by Q at position 13, S by T at position 13, N by D at position 14, N by B at position 14, N by K at position 14, N by Q at position 14, N by Rat position 14, N by S at position 14, N by T at position 14, F by D at position 15, F by B at position 15, F by K at position 15, F by R at position 15, Q by D at position 16, Q by E at position 16, Q by K at position 16, Q by N at position 16, Q by R at position 16, Q by S at position 16, Q by T at position 16, C by D at position 17, C by B at position 17, C by K at position 17, C by N at position 17, C by Q at position 17, C by R at position 17, C by S at position 17, C by T at position 17, L by N at position 20, L by Q at position 20, C by R at position 20, C by S at position 20, L by T at position 20, L by D at position 20, L by R at position 20, L by S at position 20, L by T at position 20, L by D at position 20, L by E at position 20, L by K at position 20, W by D at position 22, W by E at position 22, W by K at position 22, W by R at position 22, Q by D at position 23, Q by E at position 23, Q by K at position 23, Q by R at position 23, L by D at position 24, L by E at position 24, L by K at position 24, L by R at position 24, W by D at position 79, W by E at position 79, W by K at position 79, W by R at position 79, N by D at position 80, N by E at position 80, N by K at position 80, N by R at position 80, T by D at position 82, T by E at position 82, T by K at position 82, T by R at position 82, I by D at position 83, I by E at position 83, I by K at position 83, I by R at position 83, N by N at position 83, N by Q at position 83, N by S at position 83, N by T at position 83, N by D at position 86, N by E at position 86, N by K at position 86, N by R at position 86, N by Q at position 86, N by S at position 86, N by T at position 86, L by D at position 87, L by E at position 87, L by K at position 87, L by R at position 87, L by N at position 87, L by Q at position 87, L by S at position 87, L by T at position 87, A by D at position 89, A by E at position 89, A by K at position 89, A by R at position 89, N by D at position 90, N by E at position 90, N by K at position 90, N by Q at position 90, N by R at position 90, N by S at position 90, N by T at position 90, V by D at position 91, V by E at position 91, V by K at position 91, V by N at position 91, V by Q at position 91, V by R at position 91, V by S at position 91, V by T at position 91, Q by D at position 94, Q by E at position 94, Q by Q at position 94, Q by N at position 94, Q by R at position 94, Q by S at position 94, Q by T at position 94, I by D at position 95, I by E at position 95, I by K at position 95, I by N at position 95, I by Q at position 95, I by R at position 95, I by S at position 95, I by T at position 95, H by D at position 97, H by E at position 97, H by K at position 97, H by N at position 97, H by Q at position 97, H by R at position 97, H by S at position 97, H by T at position 97, L by D at position 98, L by E at position 98, L by K at position 98, L by N at position 98, L by Q at position 98, L by R at position 98, L by S at position 98, L by T at position 98, V by D at position 101, V by E at position 101, V by K at position 101, V by N at position 101, V by Q at position 101, V by R at position 101, V by S at position 101, V by T at position 101, M by C at position 1, L by C at position 6, Q by C at position 10, S by C at position 13, Q by C at position 16, L by C at position 17, V by C at position 101, t by C at position 98, H by C at position 97, Q by C at position 94, V by C at position 91, or N by C at position 90, wherein residue 1 corresponds to residue 1 of the mature IFN-β cytokine set forth in SEQ ID NO:197; and further comprises an amino acid sequence that differs from the amino acid sequence of the parent polypeptide to the extent that the variant comprises one or more glycosylation sites not found in the parent polypeptide.

3-D Structural Homologs

[0567] In other embodiments, the hyperglycosylated, protease-resistant interferon variant is a modified IFN-β cytokine, comprising one or more amino acid replacements at one or more target positions in SEQ ID NO:197 (as set forth in FIG. 3) corresponding to a structurally-related modified amino acid position within the 3-dimensional structure of an above-described IFN-α2b polypeptide variant, where the replacement(s) lead to greater resistance to proteases, as assessed by incubation with a protease or with a blood lysate or by incubation with serum (as described above), compared to the unmodified IFN-β. In some of these embodiments, the modified IFN-β is selected from among proteins comprising one or more single amino acid replacements at one or more target positions in SEQ ID NO: 197 (as set forth in FIG. 3), corresponding to any of amino acid positions: 39, 42, 45, 47, 52, 67, 71, 73, 81, 107, 108, 109, 110, 111, 113, 116, 120, 123, 124, 128, 130, 138, 136, 137, 163 and 165, where the mutations include insertions, deletions and replacements of the native amino acid residue(s); where the variant further comprises an amino acid sequence that differs from the amino acid sequence of the parent polypeptide to the extent that the variant comprises one or more glycosylation sites not found in the parent polypeptide.

[0568] In other embodiments, the hyperglycosylated, protease-resistant interferon variant is a modified IFN-β cytokine comprising one or more amino acid replacements, where the replacements are selected from amino acid substitutions in SEQ ID NO:197 (as set forth in FIG. 3) corresponding to: D by Q at position 39, D by H at position 39, D by G at position 39, E by Q at position 42, E by H at position 42, K by Q at position 45, K by T at position 45, K by S at position 45, K by H at position 45, L by V at position 47, L by I at position 47, L by T at position 47, L by Q at position 47, L by H at position 47, L by A at position 47, K by Q at position 52, K by T at position 52, K by S at position 52, K by H at position 52, F by I at position 67, F by V at position 67, R by H at position 71, R by Q at position 71, D by H at position 73, D by G at position 73, D by Q at position 73, E by Q at position 81, E by H at position 81, E by Q at position 107, E by H at position 107, K by Q at position 108, K by T at position 108, K by S at position 108, K by H at position 108, E by Q at position 109, E by H at position 109, D by Q at position 110, D by H at position 110, D by G at position 110, F by I at position 111, F by V at position 111, R by H at position 113, R by Q at position 113, L by V at position 116, L by I at position 116, L by T at position 116, L by Q at position 116, L by H at position 116, L by A at position 116, L by V at position 120, L by I at position 120, L by T at position 120, L by Q at position 120, L by H at position 120, L by A at position 120, K by Q at position 123, K by T at position 123, K by S at position 123, K by H at position 123, R by H at position 124, R by Q at position 124, R by H at position 128, R by Q at position 128, L by V at position 130, L by I at position 130, L by T at position 130, L by Q at position 130, L by H at position 130, L by A at position 130, K by Q at position 138, K by T at position 138, K by S at position 138, K by H at position 138, K by Q at position 136, K by T at position 136, K by S at position 136, K by H at position 136, E by Q at position 137, E by H at position 137, Y by H at position 163, Y by I at position 1631, R by H at position 165, or R by Q at position 165, wherein the first amino acid listed is substituted by the second at the position indicated; where the variant further comprises an amino acid sequence that differs from the amino acid sequence of the parent polypeptide to the extent that the variant comprises one or more glycosylation sites not found in the parent polypeptide.

[0569] In some embodiments, any of the above-described hyperglycosylated, protease-resistant IFN-β variants has increased stability compared to the unmodified (parent) cytokine, where the stability is assessed by measuring residual biological activity after incubation with either a mixture of proteases, individual proteases, blood lysate, or serum, as described above. In other embodiments, any of the above-described hyperglycosylated, protease-resistant IFN-β variants has increased biological activity compared to the unmodified (parent) cytokine, after incubation with either a mixture of proteases, individual proteases, blood lysate, or serum, as described above.

[0570] In other embodiments, the hyperglycosylated, protease-resistant interferon variant is a modified IFN-β1 cytokine, comprising one or more amino acid replacements at one or more target positions in SEQ ID NO:196 (as set forth in FIG. 22) corresponding to a structurally-related modified amino acid position within the 3-dimensional structure of an above-described IFN-α2b polypeptide variant, where the replacement(s) lead to greater resistance to proteases, as assessed by incubation with a protease or with a blood lysate or by incubation with serum (as described above), compared to the unmodified IFN-β1. In some of these embodiments, the modified IFN-β1 is selected from among proteins comprising one or more single amino acid replacements at one or more target positions in SEQ ID NO: 196 (as set forth in FIG. 22), corresponding to any of amino acid positions: 39, 42, 45, 47, 52, 67, 71, 73, 81, 107, 108, 109, 110, 111, 113, 116, 120, 123, 124, 128, 130, 138, 136, 137, 163 and 165, where the mutations include insertions, deletions and replacements of the native amino acid residue(s); where the variant further comprises an amino acid sequence that differs from the amino acid sequence of the parent polypeptide to the extent that the variant comprises one or more glycosylation sites not found in the parent polypeptide.

[0571] In some embodiments, any of the above-described hyperglycosylated, protease-resistant IFN-β1 variants has increased stability compared to the unmodified (parent) cytokine, where the stability is assessed by measuring residual biological activity after incubation with either a mixture of proteases, individual proteases, blood lysate, or serum, as described above. In other embodiments, any of the above-described hyperglycosylated, protease-resistant IFN-β1 variants has increased biological activity compared to the unmodified (parent) cytokine, after incubation with either a mixture of proteases, individual proteases, blood lysate, or serum, as described above.

[0572] In other embodiments, the protease-resistant interferon variant is a modified IFN-β2a cytokine, comprising one or more amino acid replacements at one or more target positions in SEQ ID NO:198 (as set forth in FIG. 23) corresponding to a structurally-related modified amino acid position within the 3-dimensional structure of an above-described IFN-α2b polypeptide variant, where the replacement(s) lead to greater resistance to proteases, as assessed by incubation with a protease or with a blood lysate or by incubation with serum (as described above), compared to the unmodified IFN-β2a. In some of these embodiments, the modified IFN-β2a is selected from among proteins comprising one or more single amino acid replacements at one or more target positions in SEQ ID NO: 198 (as set forth in FIG. 23), corresponding to any of amino acid positions: 39, 42, 45, 47, 52, 67, 71, 73, 81, 107, 108, 109, 110, 111, 113, 116, 120, 123, 124, 128, 130, 138, 136, 137, 163 and 165, where the mutations include insertions, deletions and replacements of the native amino acid residue(s); where the variant further comprises an amino acid sequence that differs from the amino acid sequence of the parent polypeptide to the extent that the variant comprises one or more glycosylation sites not found in the parent polypeptide.

[0573] In some embodiments, any of the above-described hyperglycosylated, protease-resistant polypeptide IFN-β2a variants has increased stability compared to the unmodified (parent) cytokine, where the stability is assessed by measuring residual biological activity after incubation with either a mixture of proteases, individual proteases, blood lysate, or serum, as described above. In other embodiments, any of the above-described hyperglycosylated, protease-resistant IFN-β2a variants has increased biological activity compared to the unmodified (parent) cytokine, after incubation with either a mixture of proteases, individual proteases, blood lysate, or serum, as described above.

[0574] In another aspect, the present invention provides a cytokine structural homolog of any of the above-described protease-resistant IFN-β variants, where the homolog comprises one or more amino acid replacements at positions corresponding to the 3dimentional-structurally-similar modified positions within the 3-dimensional structure of the modified IFN-β. In many embodiments, the homolog has increased resistance to proteolysis compared to its unmodified cytokine counterpart, wherein the resistance to proteolysis is measured by mixture with a protease in vitro, incubation with blood, or incubation with serum. In many embodiments, the cytokine is an IFN-β cytokine.

[0575] In another aspect, the present invention provides a modified IFN-β cytokine (e.g., a hyperglycosylated, protease-resistant IFN-β variant), comprising one or more amino acid replacements at one or more target positions in SEQ ID NO. 197 (the amino acid sequence set forth in FIG. 3) corresponding to a structurally-related modified amino acid position within the 3-dimensional structure of any of the above-described IFN-β modified cytokines, where the replacements lead to greater resistance to proteases, as assessed by incubation with a protease or a with a blood lysate or by incubation with serum, compared to the unmodified IFN-β.

[0576] In some embodiments, any of the above-described hyperglycosylated, protease-resistant IFN-β variants has increased stability compared to the unmodified (parent) cytokine, where the stability is assessed by measuring residual biological activity to either inhibit viral replication or to stimulate cell proliferation in appropriate cells, after incubation with either a mixture of proteases, individual proteases, blood lysate, or serum, as described above.

[0577] In some embodiments, any of the above-described hyperglycosylated, protease-resistant IFN-β variants has increased biological activity compared to the unmodified (parent) cytokine, where the activity is assessed by the capacity to either inhibit viral replication in appropriate cells, or to inhibit cell proliferation in appropriate cells, after incubation with either a mixture of proteases, individual proteases, blood lysate, or serum, as described above.

[0578] In some embodiments, a hyperglycosylated, protease-resistant IFN-β variant (a “modified IFN-β cytokine”) is selected from the group of proteins comprising one or more single amino acid replacements in SEQ ID NO:197, as set forth in FIG. 3, corresponding to the replacement of: M by V at position 1, M by I at position 1, M by T at position 1, M by Q at position 1, M by A at position 1, L by V at position 5, L by I at position 5, L by T at position 5, L by Q at position 5, L by H at position 5, L by A at position 5, F by I at position 8, F by V at position 8, L by V at position 9, L by I at position 9, L by T at position 9, L by Q at position 9, L by H at position 9, L by A at position 9, R by H at position 11, R by Q at position 11, F by I at position 15, F by V at position 15, K by Q at position 19, K by T at position 19, K by S at position 19, K by H at position 19, W by S at position 22, W by H at position 22, N by H at position 25, N by S at position 25, N by Q at position 25, R by H position 27, R by Q position 27, L by V at position 28, L by I at position 28, L by T at position 28, L by Q at position 28, L by H at position 28, L by A at position 28, E by Q at position 29, E by H at position 29, Y by H at position 30, Y by I at position 30, L by V at position 32, L by I at position 32, L by T at position 32, L by Q at position 32, L by H at position 32, L by A at position 32, K by Q at position 33, K by T at position 33, K by S at position 33, K by H at position 33, R by H at position 35, R by Q at position 35, M by V at position 36, M by I at position 36, M by T at position 36, M by Q at position 36, M by A at position 36, D by Q at position 39, D by H at position 39, D by G at position 39, E by Q at position 42, E by H at position 42, K by Q at position 45, K by T at position 45, K by S at position 45, K by H at position 45, L by V at position 47, L by I at position 47, L by T at position 47, L by, Q at position 47, L by H at position 47, L by A at position 47, K by Q at position 52, K by T at position 52, K by S at position 52, K by H at position 52, F by I at position 67, F by V at position 67, R by H at position 71, R by Q at position 71, D by Q at position 73, D by H at position 73, D by G at position 73, E by Q at position 81, E by H at position 81, E by Q at position 85, E by H at position 85, Y by H at position 92, Y by I at position 92, K by Q at position 102, K by T at position 102, K by S at position 102, K by H at position 102, E by Q at position 103, E by H at position 103, E by Q at position 104, E by H at position 104, K by Q at position 105, K by T at position 105, K by S at position 105, K by H at position 105, E by Q at position 107, E by H at position 107, K by Q at position 108, K by T at position 108, K by S at position 108, K by H at position 108, E by Q at position 109, E by H at position 109, D by Q at position 110, D by H at position 110, D by G at position 110, F by I at position 111, F by V at position 111, R by H at position 113, R by Q at position 113, L by V at position 116, L by I at position 116, L by T at position 116, L by Q at position 116, L by H at position 116, L by A at position 116, L by Y at position 120, L by I at position 120, L by T at position 120, L by Q at position 120, L by H at position 120, L by A at position 120, K by Q at position 123, K by T at position 123, K by S at position 123, K by H at position 123, R by H at position 124, R by Q at position 124, R by H at position 128, R by Q at position 128, L by V at position 130, L by I at position 130, L by T at position 130, L by Q at position 130, L by H at position 130, L by A at position 130, K by Q at position 138, K by T at position 138, K by S at position 138, K by H at position 138, K by Q at position 136, K by T at position 136, K by S at position 136, K by H at position 136, E by Q at position 137, E by H at position 137, Y by H at position 138, Y by I at position 138, R by H at position 152, R by Q at position 152, Y by H at position 155, Y by I at position 155, R by H at position 159, R by Q at position 159, Y by H at position 163, Y by I at position 163, R by H at position 165, R by Q at position 165, M by D at position 1, M by E at position 1, M by K at position 1, M by N at position 1, M by R at position 1, M by S at position 1, L by D at position 5, L by E at position 5, L by K at position 5, L by N at position 5, L by R at position 5, L by S at position 5, L by D at position 6, L by E at position 6, L by K at position 6, L by N at position 6, L by R at position 6, L by S at position 6, L by Q at position 6, L by T at position 6, F by E at position 8, F by K at position 8, F by R at position 8, F by D at position 8, L by D at position 9, L by E at position 9, L by K at position 9, L by N at position 9, L by R at position 9, L by S at position 9, Q by D at position 10, Q by E at position 10, Q by K at position 10, Q by N at position 10, Q by R at position 10, Q by S at position 10, Q by T at position 10, S by D at position 12, S by E at position 12, S by K at position 12, S by R at position 12, S by D at position 13, S by E at position 13, S by K at position 13, S by R at position 13, S by N at position 13, S by Q at position 13, S by T at position 13, N by D at position 14, N by E at position 14, N by K at position 14, N by Q at position 14, N by R at position 14, N by S at position 14, N by T at position 14, F by D at position 15, F by E at position 15, F by K at position 15, F by R at position 15, Q by D at position 16, Q by E at position 16, Q by K at position 16, Q by N at position 16, Q by R at position 16, Q by S at position 16, Q by T at position 16, C by D at position 17, C by E at position 17, C by K at position 17, C by N at position 17, C by Q at position 17, C by R at position 17, C by S at position 17, C by T at position 17, L by N at position 20, L by Q at position 20, L by R at position 20, L by S at position 20, L by T at position 20, L by D at position 20, L by E at position 20, L by K at position 20, W by D at position 22, W by E at position 22, W by K at position 22, W by R at position 22, Q by D at position 23, Q by E at position 23, Q by K at position 23, Q by R at position 23, L by D at position 24, L by E at position 24, L by K at position 24, L by R at position 24, W by D at position 79, W by E at position 79, W by K at position 79, W by R at position 79, N by D at position 80, N by E at position 80, N by K at position 80, N by R at position 80, T by D at position 82, T by E at position 82, T by K at position 82, T by R at position 82, I by D at position 83, I by E at position 83, I by K at position 83, I by R at position 83, I by N at position 83, I by Q at position 83, I by S at position 83, I by T at position 83, N by D at position 86, N by E at position 86, N by K at position 86, N by R at position 86, N by Q at position 86, N by S at position 86, N by T at position 86, L by D at position 87, L by E at position 87, L by K at position 87, L by R at position 87, L by N at position 87, L by Q at position 87, L by S at position 87, L by T at position 87, A by D at position 89, A by E at position 89, A by K at position 89, A by R at position 89, N by D at position 90, N by E at position 90, N by K at position 90, N by Q at position 90, N by R at position 90, N by S at position 90, N by T at position 90, V by D at position 91, V by E at position 91, V by K at position 91, V by N at position 91, V by Q at position 91, V by R at position 91, V by S at position 91, V by T at position 91, Q by D at position 94, Q by E at position 94, Q by Q at position 94, Q by N at position 94, Q by R at position 94, Q by S at position 94, Q by T at position 94, I by D at position 95, I by E at position 95, I by K at position 95, I by N at position 95, I by Q at position 95, I by R at position 95, I by S at position 95, I by T at position 95, H by D at position 97, H by E at position 97, H by K at position 97, H by N at position 97, H by Q at position 97, H by R at position 97, H by S at position 97, H by T at position 97, L by D at position 98, L by E at position 98, L by K at position 98, L by N at position 98, L by Q at position 98, L by R at position 98, L by S at position 98, L by T at position 98, V by D at position 101, V by E at position 101, V by K at position 101, V by N at position 101, V by Q at position 101, V by R at position 101, V by S at position 101, V by T at position 101, M by C at position 1, L by C at position 6, Q by C at position 10, S by C at position 13, Q by C at position 16, L by C at position 17, V by C at position 101, L by C at position 98, H by C at position 97, Q by C at position 94, V by C at position 91, or N by C at position 90, or any combination of such replacements, wherein residue 1 corresponds to residue 1 of the mature IFN-βcytokine set forth in SEQ ID NO:197 (as set forth in FIG. 3); where the variant further comprises an amino acid sequence that differs from the amino acid sequence of the parent polypeptide to the extent that the variant comprises one or more glycosylation sites not found in the parent polypeptide.

[0579] In other embodiments, a hyperglycosylated, protease-resistant IFN-β variant (a “modified IFN-β cytokine”) is selected from the group of proteins comprising one or more single amino acid replacements in SEQ ID NO:197, as set forth in FIG. 3, corresponding to the replacement of: D by Q at position 39, D by H at position 39, D by G at position 39, E by Q at position 42, E by H at position 42, K by Q at position 45, K by T at position 45, K by S at position 45, K by H at position 45, L by V at position 47, L by I at position 47, L by T at position 47, L by Q at position 47, L by H at position 47, L by A at position 47, K by Q at position 52, K by T at position 52, K by S at position 52, K by H at position 52, F by I at position 67, F by V at position 67, R by H at position 71, R by Q at position 71, D by H at position 73, D by G at position 73, D by Q at position 73, E by Q at position 81, E by H at position 81, E by Q at position 107, E by H at position 107, K by Q at position 108, K by T at position 108, K by S at position 108, K by H at position 108, E by Q at position 109, E by H at position 109, D by Q at position 110, D by H at position 110, D by G at position 110, F by I at position 111, F by V at position 111, R by H at position 113, R by Q at position 113, L by V at position 116, L by I at position 116, L by T at position 116, L by Q at position 116, L by H at position 116, L by A at position 116, L by V at position 120, L by I at position 120, L by T at position 120, L by Q at position 120, L by H at position 120, L by A at position 120, K by Q at position 123, K by T at position 123, K by S at position 123, K by H at position 123, R by H at position 124, R by Q at position 124, R by H at position 128, R by Q at position 128, L by V at position 130, L by I at position 130, L by T at position 130, L by Q at position 130, L by H at position 130, L by A at position 130, K by Q at position 138, K by T at position 138, K by S at position 138, K by H at position 138, K by Q at position 136, K by T at position 136, K by S at position 136, K by H at position 136, E by Q at position 137, E by H at position 137, Y by H at position 163, Y by I at position 1631, R by H at position 165, or R by Q at position 165, or any combination of such replacements, wherein the first amino acid listed is substituted by the second at the position indicated; where the variant further comprises an amino acid sequence that differs from the amino acid sequence of the parent polypeptide to the extent that the variant comprises one or more glycosylation sites not found in the parent polypeptide.

[0580] In some embodiments, a hyperglycosylated, protease-resistant IFN-β variant (a “modified IFN-β cytokine”) is selected from the group of proteins comprising one or more single amino acid replacements in SEQ ID NO: 197, as set forth in FIG. 3, corresponding to the replacement of: M by V at position 1, M by I at position 1, M by T at position 1, M by Q at position 1, M by A at position 1, L by V at position 5, L by I at position 5, L by T at position 5, L by Q at position 5, L by H at position 5, L by A at position 5, F by I at position 8, F by V at position 8, L by V at position 9, L by I at position 9, L by T at position 9, L by Q at position 9, L by H at position 9, L by A at position 9, R by H at position 11, R by Q at position 11, F by I at position 15, F by V at position 15, K by Q at position 19, K by T at position 19, K by S at position 19, K by H at position 19, W by S at position 22, W by H at position 22, N by H at position 25, N by S at position 25, N by Q at position 25, R by H position 27, R by Q position 27, L by V at position 28, L by I at position 28, L by T at position 28, L by Q at position 28, L by H at position 28, L by A at position 28, E by Q at position 29, E by H at position 29, Y by H at position 30, Y by I at position 30, L by V at position 32, L by I at position 32, L by T at position 32, L by Q at position 32, L by H at position 32, L by A at position 32, K by Q at position 33, K by T at position 33, K by S at position 33, K by H at position 33, R by H at position 35, R by Q at position 35, M by V at position 36, M by I at position 36, M by T at position 36, M by Q at position 36, M by A at position 36, D by Q at position 39, D by H at position 39, D by G at position 39, E by Q at position 42, E by H at position 42, K by Q at position 45, K by T at position 45, K by S at position 45, K by H at position 45, L by V at position 47, L by I at position 47, L by T at position 47, L by, Q at position 47, L by H at position 47, L by A at position 47, K by Q at position 52, K by T at position 52, K by S at position 52, K by H at position 52, F by I at position 67, F by V at position 67, R by H at position 71, R by Q at position 71, D by Q at position 73, D by H at position 73, D by G at position 73, E by Q at position 81, E by H at position 81, E by Q at position 85, E by H at position 85, Y by H at position 92, Y by I at position 92, K by Q at position 102, K by T at position 102, K by S at position 102, K by H at position 102, E by Q at position 103, E by H at position 103, E by Q at position 104, E by H at position 104, K by Q at position 105, K by T at position 105, K by S at position 105, K by H at position 105, E by Q at position 107, E by H at position 107, K by Q at position 108, K by T at position 108, K by S at position 108, K by H at position 108, E by Q at position 109, E by H at position 109, D by Q at position 110, D by H at position 110, D by G at position 110, F by I at position 111, F by V at position 111, R by H at position 113, R by Q at position 113, L by V at position 116, L by I at position 116, L by T at position 116, L by Q at position 116, L by H at position 116, L by A at position 116, L by V at position 120, L by I at position 120, L by T at position 120, L by Q at position 120, L by H at position 120, L by A at position 120, K by Q at position 123, K by T at position 123, K by S at position 123, K by H at position 123, R by H at position 124, R by Q at position 124, R by H at position 128, R by Q at position 128, L by V at position 130, L by I at position 130, L by T at position 130, L by Q at position 130, L by H at position 130, L by A at position 130, K by Q at position 138, K by T at position 138, K by S at position 138, K by H at position 138, K by Q at position 136, K by T at position 136, K by S at position 136, K by H at position 136, E by Q at position 137, E by H at position 137, Y by H at position 138, Y by I at position 138, R by H at position 152, R by Q at position 152, Y by H at position 155, Y by I at position 155, R by H at position 159, R by Q at position 159, Y by H at position 163, Y by I at position 163, R by H at position 165, R by Q at position 165, M by D at position 1, M by E at position 1, M by K at position 1, M by N at position 1, M by R at position 1, M by S at position 1, L by D at position 5, L by E at position 5, L by K at position 5, L by N at position 5, L by R at position 5, L by S at position 5, L by D at position 6, L by E at position 6, L by K at position 6, L by N at position 6, L by R at position 6, L by S at position 6, L by Q at position 6, L by T at position 6, F by E at position 8, F by K at position 8, F by R at position 8, F by D at position 8, L by D at position 9, L by E at position 9, L by K at position 9, L by N at position 9, L by R at position 9, L by S at position 9, Q by D at position 10, Q by E at position 10, Q by K at position 10, Q by N at position 10, Q by R at position 10, Q by S at position 10, Q by T at position 10, S by D at position 12, S by E at position 12, S by K at position 12, S by R at position 12, S by D at position 13, S by E at position 13, S by K at position 13, S by R at position 13, S by N at position 13, S by Q at position 13, S by T at position 13, N by D at position 14, N by E at position 14, N by K at position 14, N by Q at position 14, N by R at position 14, N by S at position 14, N by T at position 14, F by D at position 15, F by E at position 15, F by K at position 15, F by R at position 15, Q by D at position 16, Q by E at position 16, Q by K at position 16, Q by N at position 16, Q by R at position 16, Q by S at position 16, Q by T at position 16, C by D at position 17, C by E at position 17, C by K at position 17, C by N at position 17, C by Q at position 17, C by R at position 17, C by S at position 17, C by T at position 17, L by N at position 20, L by Q at position 20, L by R at position 20, L by S at position 20, L by T at position 20, L by D at position 20, L by E at position 20, L by K at position 20, W by D at position 22, W by E at position 22, W by K at position 22, W by R at position 22, Q by D at position 23, Q by E at position 23, Q by K at position 23, Q by R at position 23, L by D at position 24, L by E at position 24, L by K at position 24, L by R at position 24, W by D at position 79, W by E at position 79, W by K at position 79, W by R at position 79, N by D at position 80, N by E at position 80, N by K at position 80, N by R at position 80, T by D at position 82, T by E at position 82, T by K at position 82, T by R at position 82, I by D at position 83, I by E at position 83, I by K at position 83, I by R at position 83, I by N at position 83, I by Q at position 83, I by S at position 83, I by T at position 83, N by D at position 86, N by E at position 86, N by K at position 86, N by R at position 86, N by Q at position 86, N by S at position 86, N by T at position 86, L by D at position 87, L by E at position 87, L by K at position 87, L by R at position 87, L by N at position 87, L by Q at position 87, L by S at position 87, L by T at position 87, A by D at position 89, A by E at position 89, A by K at position 89, A by R at position 89, N by D at position 90, N by E at position 90, N by K at position 90, N by Q at position 90, N by R at position 90, N by S at position 90, N by T at position 90, V by D at position 91, V by E at position 91, V by K at position 91, V by N at position 91, V by Q at position 91, V by Rat position 91, V by Sat position 91, V by T at position 91, Q by D at position 94, Q by E at position 94, Q by Q at position 94, Q by N at position 94, Q by R at position 94, Q by S at position 94, Q by T at position 94, I by D at position 95, I by E at position 95, I by K at position 95, I by N at position 95, I by Q at position 95, I by R at position 95, I by S at position 95, I by T at position 95, H by D at position 97, H by E at position 97, H by K at position 97, H by N at position 97, H by Q at position 97, H by R at position 97, H by S at position 97, H by T at position 97, L by D at position 98, L by E at position 98, L by K at position 98, L by N at position 98, L by Q at position 98, L by R at position 98, L by S at position 98, L by T at position 98, V by D at position 101, V by E at position 101, V by K at position 101, V by N at position 101, V by Q at position 101, V by R at position 101, V by S at position 101, V by T at position 101, M by C at position 1, L by C at position 6, Q by C at position 10, S by C at position 13, Q by C at position 16, L by C at position 17, V by C at position 101, L by C at position 98, H by C at position 97, Q by C at position 94, V by C at position 91, N by C at position 90, D by Q at position 39, D by H at position 39, D by G at position 39, E by Q at position 42, E by H at position 42, K by Q at position 45, K by T at position 45, K by S at position 45, K by H at position 45, L by V at position 47, L by I at position 47, L by T at position 47, L by Q at position 47, L by H at position 47, L by A at position 47, K by Q at position 52, K by T at position 52, K by S at position 52, K by H at position 52, F by I at position 67, F by V at position 67, R by H at position 71, R by Q at position 71, D by H at position 73, D by G at position 73, D by Q at position 73, E by Q at position 81, E by H at position 81, E by Q at position 107, E by H at position 107, K by Q at position 108, K by T at position 108, K by S at position 108, K by H at position 108, E by Q at position 109, E by H at position 109, D by Q at position 110, D by H at position 110, D by G at position 110, F by I at position 111, F by V at position 111, R by H at position 113, R by Q at position 113, L by V at position 116, L by I at position 116, L by T at position 116, L by Q at position 116, L by H at position 116, L by A at position 116, L by V at position 120, L by I at position 120, L by T at position 120, L by Q at position 120, L by H at position 120, L by A at position 120, K by Q at position 123, K by T at position 123, K by S at position 123, K by H at position 123, R by H at position 124, R by Q at position 124, R by H at position 128, R by Q at position 128, L by V at position 130, L by I at position 130, L by T at position 130, L by Q at position 130, L by Hat position 130, L by A at position 130, K by Q at position 138, K by T at position 138, K by S at position 138, K by H at position 138, K by Q at position 136, K by T at position 136, K by S at position 136, K by H at position 136, E by Q at position 137, E by H at position 137, Y by H at position 163, Y by I at position 163, R by H at position 165, or R by Q at position 165, or any combination of such replacements, wherein the first amino acid listed is substituted by the second at the position indicated; where the variant further comprises an amino acid sequence that differs from the amino acid sequence of the parent polypeptide to the extent that the variant comprises one or more glycosylation sites not found in the parent polypeptide.

[0581] In particular embodiments, a hyperglycosylated, protease-resistant IFN-β variant (a “modified IFN-β cytokine”) is selected from the group consisting of a modified IFN-β comprising an amino acid sequence as depicted in any of SEQ ID Nos. 234-289, and 989-1302; where the variant further comprises an amino acid sequence that differs from the amino acid sequence of the parent polypeptide to the extent that the variant comprises one or more glycosylation sites not found in the parent polypeptide.

[0582] In particular embodiments, a hyperglycosylated, protease-resistant IFN-β variant (a “modified IFN-β cytokine”) comprises one or more of the amino acid replacements set forth in Table 2 (IFN-β); where the variant further comprises an amino acid sequence that differs from the amino acid sequence of the parent polypeptide to the extent that the variant comprises one or more glycosylation sites not found in the parent polypeptide.

TABLE 2
(IFN-β)

| | |
|---|---|
| 1. | D39Q |
| 2. | D39N |
| 3. | E42Q |
| 4. | E42N |
| 5. | E42H |
| 6. | K45Q |
| 7. | K45N |
| 8. | L47V |
| 9. | L47I |
| 10. | K52Q |
| 11. | K52N |
| 12. | F67I |
| 13. | F67V |
| 14. | R71H |
| 15. | R71Q |
| 16. | D73Q |
| 17. | D73N |
| 18. | E81Q |
| 19. | E81N |
| 20. | E81H |
| 21. | E107Q |
| 22. | E107N |
| 23. | E107H |
| 24. | K108Q |
| 25. | K108N |
| 26. | E109Q |
| 27. | E109N |
| 28. | E109H |
| 29. | D110Q |
| 30. | D110N |
| 31. | F111I |
| 32. | F111V |
| 33. | R113H |
| 34. | R113Q |
| 35. | L116V |
| 36. | L116I |
| 37. | L120V |
| 38. | L120I |
| 39. | K123Q |
| 40. | K123N |
| 41. | R124H |
| 42. | R124Q |
| 43. | R128H |
| 44. | R128Q |
| 45. | L130V |
| 46. | L130I |
| 47. | K134Q |
| 48. | K134N |
| 49. | K136Q |
| 50. | K136N |
| 51. | E137Q |
| 52. | E137N |
| 53. | E137H |
| 54. | Y163H |
| 55. | Y163I |
| 56. | R165H |
| 57. | R165Q |

[0583] In some embodiments, any of the above-described hyperglycosylated or protease-resistant, hyperglycosylated IFN-β variants is a variant of IFN-β1a, and the variant is an [S102N]IFN-β1a glycopeptide, where the [S102N]IFN-β1a glycopeptide is a variant of IFN-β1a having (a) an asparagine residue substituted for the native serine residue at amino acid position 102 in the amino acid sequence of IFN-β1a (where the S102 amino acid position is as set forth in FIG. 24; and corresponds to S74 in the IFN-β amino acid sequence set forth in FIG. 3); and (b) a carbohydrate moiety covalently attached to the R-group of said asparagine residue.

[0584] In some embodiments, any of the above-described hyperglycosylated or protease-resistant, hyperglycosylated IFN-β variants is a variant of IFN-β1a, and the variant is an [S102N, E138N]IFN-β1a glycopeptide, where the [S102N, E138N]IFN-β1a glycopeptide is a variant of IFN-β1a having (a) an asparagine residue substituted for each of the native serine and glutamic acid residues at amino acid positions 102 and 138, respectively, in the amino acid sequence of IFN-β1a (where the S102 and E 138 amino acid positions are as set forth in FIG. 24; and correspond to S74 and E109, respectively, in the IFN-β amino acid sequence set forth in FIG. 3); and (b) a carbohydrate moiety covalently attached to the R-group of each of said asparagine residues.

[0585] In some embodiments, any of the above-described hyperglycosylated or protease-resistant, hyperglycosylated IFN-β variants is a variant of IFN-β1a, and the variant is an [S102N, E138N, F136T]IFN-β1a glycopeptide, where the [S102N, E138N, F136T]IFN-β1a glycopeptide is a variant of IFN-β1a having (a) asparagine, asparagine and threonine residues substituted for the native serine, glutamic acid and phenylalanine residues at amino acid positions 102, 138 and 136, respectively, in the amino acid sequence of IFN-β1a (where the S102, E138, and F136 amino acid positions are as set forth in FIG. 24; and correspond to S74, E109, and F111, respectively, in the IFN-β amino acid sequence set forth in FIG. 3); and (b) a carbohydrate moiety covalently attached to the R-group of each of said asparagine residues.

[0586] In some embodiments, any of the above-described hyperglycosylated or protease-resistant, hyperglycosylated IFN-β variants is a variant of IFN-β1a, and the variant is an [E138N]IFN-β1a glycopeptide, where the [E138N]IFN-α1a glycopeptide is a variant of IFN-β1a having (a) an asparagine residue substituted for the native glutamic acid residue at amino acid position 138 in the amino acid sequence of IFN-β1a (where the amino acid positions are as set forth in FIG. 24); and (b) a carbohydrate moiety covalently attached to the R-group of said asparagine residue.

[0587] In some embodiments, any of the above-described hyperglycosylated or protease-resistant, hyperglycosylated IFN-β variants is a variant of IFN-β1a, and the variant is an [E138N, F136T]IFN-β1a glycopeptide, where the [E138N, F136T]IFN-β1a glycopeptide is a variant of IFN-β1a having (a) asparagine and threonine residues substituted for the native glutamic acid and phenylalanine residues at amino acid positions 138 and 136, respectively, in the amino acid sequence of IFN-β 1a (where the amino acid positions are as set forth in FIG. 24); and (b) a carbohydrate moiety covalently attached to the R-group of said asparagine residue.

[0588] In some embodiments, any of the above-described hyperglycosylated or protease-resistant, hyperglycosylated IFN-β variants is a variant of IFN-β1a, and the variant is an [E138T]IFN-β1a glycopeptide, where the [E138T]IFN-β1a glycopeptide is a variant of IFN-β1a having (a) a threonine residue substituted for the native glutamic acid residue at amino acid position 138 in the amino acid sequence of IFN-β1 a (where the amino acid positions are as set forth in FIG. 24); and (b) a carbohydrate moiety covalently attached to the R-group of said threonine residue.

[0589] In some embodiments, any of the above-described hyperglycosylated or protease-resistant, hyperglycosylated IFN-β variants is a variant of IFN-β1a, and the variant is an [S102N, E138T]IFN-β1a glycopeptide, where the [S102N, E138T]IFN-β1a glycopeptide is a variant of IFN-β1a having (a) asparagine and threonine residues substituted for the native serine and glutamic acid residues at amino acid positions 102 and 138, respectively, in the amino acid sequence of IFN-β1a (where the amino acid positions are as set forth in FIG. 24); and (b) a carbohydrate moiety covalently attached to the R-group of each of said asparagine and threonine residues.

[0590] In some embodiments, any of the above-described hyperglycosylated or protease-resistant, hyperglycosylated IFN-β variants is a variant of IFN-β1b, and the variant is an [S102N]IFN-β1b glycopeptide, where the [S102N]IFN-β1b glycopeptide is a variant of IFN-β1b having (a) an asparagine residue substituted for the native serine residue at amino acid position 102 in the amino acid sequence of IFN-β1b (where the amino acid positions are as set forth in FIG. 24); and (b) a carbohydrate moiety covalently attached to the R-group of said asparagine residue.

[0591] In some embodiments, any of the above-described hyperglycosylated or protease-resistant, hyperglycosylated IFN-β variants is a variant of IFN-β1b, and the variant is an [S102N, E138N]IFN-β1b glycopeptide, where the [S102N, E138N]IFN-β1b glycopeptide is a variant of IFN-β1b having (a) an asparagine residue substituted for the native serine residue and glutamic acid residue at amino acid positions 102 and 138, respectively, in the amino acid sequence of IFN-β1b (where the amino acid positions are as set forth in FIG. 24); and (b) a carbohydrate moiety covalently attached to the R-group of each of said asparagine residues.

[0592] In some embodiments, any of the above-described hyperglycosylated or protease-resistant, hyperglycosylated IFN-β variants is a variant of IFN-β1b, and the variant is an [S102N, E138N, F136T]IFN-β1b glycopeptide, where the [S102N, E138N, F136T]IFN-β1b glycopeptide is a variant of IFN-β1b having (a) asparagine, asparagine and threonine residues substituted for the native serine, glutamic acid and phenylalanine residues at amino acid positions 102, 138 and 136, respectively, in the amino acid sequence of IFN-β1b (where the amino acid positions are as set forth in FIG. 24); and (b) a carbohydrate moiety covalently attached to the R-group of each of said asparagine residues.

[0593] In some embodiments, any of the above-described hyperglycosylated or protease-resistant, hyperglycosylated IFN-β variants is a variant of IFN-β1b, and the variant is an [E138N]IFN-β1b glycopeptide, where the [E138N]IFN-β1b glycopeptide is a variant of IFN-β1b having (a) an asparagine residue substituted for the native glutamic acid residue at amino acid position 138 in the amino acid sequence of IFN-β1b (where the amino acid positions are as set forth in FIG. 24); and (b) a carbohydrate moiety covalently attached to the R-group of said asparagine residue.

[0594] In some embodiments, any of the above-described hyperglycosylated or protease-resistant, hyperglycosylated IFN-β variants is a variant of IFN-β1b, and the variant is an [E138N, F136T]IFN-β1b glycopeptide, where the [E138N, F136T]IFN-β1b glycopeptide is a variant of IFN-β1b having (a) asparagine and threonine residues substituted for the native glutamic acid and phenylalanine residues at amino acid positions 138 and 136, respectively, in the amino acid sequence of IFN-β1b (where the amino acid positions are as set forth in FIG. 24); and (b) a carbohydrate moiety covalently attached to the R-group of said asparagine residue.

[0595] In some embodiments, any of the above-described hyperglycosylated or protease-resistant, hyperglycosylated IFN-β variants is a variant of IFN-β1b, and the variant is an [E138T]IFN-β1b glycopeptide, where the [E138T]IFN-β1b glycopeptide is a variant of IFN-β1b having (a) a threonine residue substituted for the native glutamic acid residue at amino acid position 138 in the amino acid sequence of IFN-β1b (where the amino acid positions are as set forth in FIG. 24); and (b) a carbohydrate moiety covalently attached to the R-group of said threonine residue.

[0596] In some embodiments, any of the above-described hyperglycosylated or protease-resistant, hyperglycosylated IFN-β variants is a variant of IFN-β1b, and the variant is an [S102N, E138T]IFN-β1b glycopeptide, where the [S102N, E138T]IFN-β1b glycopeptide is a variant of IFN-β1b having (a) asparagine and threonine residues substituted for the native serine and glutamic acid residues at amino acid positions 102 and 138, respectively, in the amino acid sequence of IFN-β1b (where the amino acid positions are as set forth in FIG. 24); and (b) a carbohydrate moiety covalently attached to the R-group of each of said asparagine and threonine residues.

IFN-γ Polypeptide Variants

[0597] In other embodiments, the hyperglycosylated, protease-resistant interferon variant is a modified IFN-γ cytokine, comprising one or more amino acid replacements at one or more target positions in SEQ ID NO:1102 (as set forth in FIG. 4) corresponding to a structurally-related modified amino acid position within the 3-dimensional structure of an above-described IFN-α2b polypeptide variant, where the replacement(s) lead to greater resistance to proteases, as assessed by incubation with a protease or with a blood lysate or by incubation with serum (as described above), compared to the unmodified IFN-γ. In some of these embodiments, the modified IFN-γ is selected from among proteins comprising one or more single amino acid replacements at one or more target positions in SEQ ID NO: 1102 (as set forth in FIG. 4), corresponding to any of amino acid positions: 33, 37, 40, 41, 42, 58, 61, 64, 65 and 66, where the mutations include insertions, deletions and replacements of the native amino acid residue(s). In particular embodiments, the replacements are selected from among amino acid substitutions in SEQ ID NO: 1102 set forth in Table 3, below, where the first amino acid listed is substituted by the second amino acid at the position indicated; and where the variant further comprises an amino acid sequence that differs from the amino acid sequence of the parent polypeptide to the extent that the variant comprises one or more glycosylation sites not found in the parent polypeptide.

TABLE 3

| | |
|---|---|
| 1. | L33V |
| 2. | L33I |
| 3. | K37Q |
| 4. | K37N |
| 5. | K40Q |
| 6. | K40N |
| 7. | E41Q |
| 8. | E41N |
| 9. | E41H |
| 10. | E42Q |
| 11. | E42N |
| 12. | E42H |
| 13. | K58Q |
| 14. | K58N |
| 15. | K61Q |
| 16. | K61N |
| 17. | K64Q |
| 18. | K64N |
| 19. | D65Q |
| 20. | D65N |
| 21. | D66Q |

[0598] In other embodiments, the modified IFN-γ comprises an amino acid sequence corresponding to any of SEQ ID NOS: 290-311, and further comprises one or more glycosylation sites not found in the parent polypeptide.

[0599] In some embodiments, any of the above-described protease-resistant or protease-resistant, hyperglycosylated IFN-γ variants is an [S102T]IFN-gamma glycopeptide, where the [S102T]IFN-gamma glycopeptide is a variant of the mature, native IFN-gamma having (a) a threonine residue substituted for the native serine residue at amino acid position 102 in the amino acid sequence of IFN-gamma depicted in FIG. 31 (corresponding to S102 of the IFN-γ amino acid sequence set forth in FIG. 4); and (b) a carbohydrate moiety covalently attached to the R-group of the asparagine residue at amino acid position 97 in the amino acid sequence of (a); and comprising at least one mutated protease cleavage site in place of a native protease cleavage site found in the parent IFN-γ polypeptide.

[0600] Since the glycosylation site formed by N97, Y98, T102 in the [S102T]IFN-gamma variant is different than the glycosylation site formed by N97, Y98, S102 in native IFN-gamma, the N97, Y98, T102 glycosylation site qualifies as a non-native glycosylation site not found in the parent polypeptide. In addition, as described in WO 02/081507, the S1102T substitution in the amino acid sequence of native IFN-gamma provides for greater efficiency of glycosylation at the N97, Y98, T102 glycosylation site in the [S102T]IFN-gamma variant compared to the efficiency of glycosylation at the N97, Y98, S102 glycosylation site in native IFN-gamma. Thus, [S102T]IFN-gamma qualifies as a hyperglycosylated polypeptide variant of the parent IFN-gamma polypeptide (where the N97, Y98, and S102 amino acid positions in the IFN-γ amino acid sequence set forth in FIG. 31 correspond to N100, Y101, and S102 in the IFN-γ amino acid sequence set forth in FIG. 4).

[0601] In some embodiments, any of the above-described hyperglycosylated or protease-resistant, hyperglycosylated IFN-γ variants is an [E38N]IFN-gamma glycopeptide, where the [E38N]IFN-gamma glycopeptide is a variant of the mature, native IFN-gamma having (a) an asparagine residue substituted for the native glutamic acid residue at amino acid position 38 in the amino acid sequence of IFN-gamma depicted in FIG. 31 (where amino acid E38 in the IFN-γ amino acid sequence set forth in FIG. 31 corresponds to E41 of the IFN-γ amino acid sequence set forth in FIG. 4); and (b) a carbohydrate moiety covalently attached to the R-group of the asparagine residue at amino acid position 38 in the amino acid sequence of (a); and comprising at least one mutated protease cleavage site in place of a native protease cleavage site found in the parent IFN-γ polypeptide.

[0602] In some embodiments, any of the above-described hyperglycosylated or protease-resistant, hyperglycosylated IFN-γ variants is an [E38N, S102T]IFN-gamma glycopeptide, where the [E38N, S102T]IFN-gamma glycopeptide is a variant of the mature, native IFN-gamma having (a) asparagine and threonine residues substituted for the native glutamic acid and serine residues at amino acid positions 38 and 102 in the amino acid sequence of IFN-gamma depicted in FIG. 31 (where amino acids E38 and S102 in the IFN-γ amino acid sequence set forth in FIG. 31 correspond to E41 and S102, respectively, of the IFN-γ amino acid sequence set forth in FIG. 4); and (b) a carbohydrate moiety covalently attached to the R-group of the asparagine residue at each of amino acid positions 38 and 97 in the amino acid sequence of (a); and comprising at least one mutated protease cleavage site in place of a native protease cleavage site found in the parent IFN-γ polypeptide.

[0603] In some embodiments, any of the above-described hyperglycosylated or protease-resistant, hyperglycosylated IFN-γ variants is an [E38N, S40T]IFN-gamma glycopeptide, where the [E38N, S40T]IFN-gamma glycopeptide is a variant of the mature, native IFN-gamma having (a) asparagine and threonine residues substituted for the native glutamic acid and serine residues at amino acid positions 38 and 40 in the amino acid sequence of IFN-gamma depicted in FIG. 31 (where amino acids E38 and S40 in the IFN-γ amino acid sequence set forth in FIG. 31 correspond to E41 and S43, respectively, of the IFN-γ amino acid sequence set forth in FIG. 4); and (b) a carbohydrate moiety covalently attached to the R-group of the asparagine residue at amino acid position 38 in the amino acid sequence (a); and comprising at least one mutated protease cleavage site in place of a native protease cleavage site found in the parent IFN-γ polypeptide.

[0604] In some embodiments, any of the above-described hyperglycosylated or protease-resistant, hyperglycosylated IFN-γ variants is an [E38N, S40T, S102T]IFN-gamma glycopeptide, where the [E38N, S40T, S102T]IFN-gamma glycopeptide is a variant of the mature, native IFN-gamma having (a) asparagine, threonine and threonine residues substituted for the native glutamic acid, serine and serine residues at amino acid positions 38, 40 and 102, respectively, in the amino acid sequence of IFN-gamma depicted in FIG. 31 (where amino acids E38, S40, and S102 in the IFN-γ amino acid sequence set forth in FIG. 31 correspond to E41, S43, and S102, respectively, of the IFN-γ amino acid sequence set forth in FIG. 4); and (b) a carbohydrate moiety covalently attached to the R-group of the asparagine residue at amino acid position 38 in the amino acid sequence of (a), and optionally further having (c) a carbohydrate moiety covalently attached to the R-group of the asparagine residue at amino acid position 97 in the amino acid sequence of (a); and comprising at least one mutated protease cleavage site in place of a native protease cleavage site found in the parent IFN-γ polypeptide.

[0605] In some embodiments, any of the above-described hyperglycosylated, protease-resistant IFN-γ variants has increased stability compared to the unmodified (parent) cytokine, where the stability is assessed by measuring residual biological activity after incubation with either a mixture of proteases, individual proteases, blood lysate, or serum, as described above. In other embodiments, any of the above-described protease-resistant IFN-γ variants has increased biological activity compared to the unmodified (parent) cytokine, after incubation with either a mixture of proteases, individual proteases, blood lysate, or serum, as described above.

Erythropoietin Polypeptide Variants

[0606] In other embodiments, the hyperglycosylated, protease-resistant cytokine variant is a modified erythropoietin cytokine, comprising one or more amino acid replacements at one or more target positions in SEQ ID NO:201 (as set forth in FIG. 7) corresponding to a structurally-related modified amino acid position within the 3dimensional structure of an above-described IFN-α2b polypeptide variant, where the replacement(s) lead to greater resistance to proteases, as assessed by incubation with a protease or with a blood lysate or by incubation with serum (as described above), compared to the unmodified erythropoietin. In some of these embodiments, the modified erythropoietin is selected from among proteins comprising one or more single amino acid replacements at one or more target positions in SEQ ID NO: 201 (as set forth in FIG. 7), corresponding to any of amino acid positions: 43, 45, 48, 49, 52, 53, 55, 72, 75, 76, 123, 129, 130, 131, 162, and 165, where the mutations include insertions, deletions and replacements of the native amino acid residue(s). In particular embodiments, the replacements are selected from among amino acid substitutions in SEQ ID NO:201, set forth in Table 4, below, where the first amino acid listed is substituted by the second amino acid at the position indicated; and where the variant further comprises an amino acid sequence that differs from the amino acid sequence of the parent polypeptide to the extent that the variant comprises one or more glycosylation sites not found in the parent polypeptide.

TABLE 4

| | |
|---|---|
| 1. | D43Q |
| 2. | D43N |
| 3. | K45Q |
| 4. | K45N |
| 5. | F48I |
| 6. | F48V |
| 7. | Y49H |
| 8. | Y49I |
| 9. | K52Q |
| 10. | K52N |
| 11. | R53H |
| 12. | R53Q |
| 13. | E55Q |
| 14. | E55N |
| 15. | E55H |
| 16. | E72Q |
| 17. | E72N |
| 18. | E72H |
| 19. | L75V |
| 20. | L75I |
| 21. | R76H |
| 22. | R76Q |
| 23. | D123Q |
| 24. | D123N |
| 25. | P129S |
| 26. | P129A |
| 27. | L130V |
| 28. | L130I |
| 29. | R131H |
| 30. | R131Q |
| 31. | R162H |
| 32. | R162Q |
| 33. | D165Q |
| 34. | D165N |
| 35. | P121S |
| 36. | P121A |
| 37. | P122S |
| 38. | P122A |

[0607] In other embodiments, the modified erythropoietin comprises an amino acid sequence corresponding to any of SEQ ID NOS: 940-977, and further comprises one or more glycosylation sites not found in the parent polypeptide.

GM-CSF Polypeptide Variants

[0608] In other embodiments, hyperglycosylated, the protease-resistant cytokine variant is a modified GM-CSF cytokine, comprising one or more amino acid replacements at one or more target positions in SEQ ID NO:202 (as set forth in FIG. 8) corresponding to a structurally-related modified amino acid position within the 3-dimensional structure of an above-described erythropoietin polypeptide variant, where the replacement(s) lead to greater resistance to proteases, as assessed by incubation with a protease or with a blood lysate or by incubation with serum (as described above), compared to the unmodified GM-CSF. In some of these embodiments, the modified GM-CSF is selected from among proteins comprising one or more single amino acid replacements at one or more target positions in SEQ ID NO: 202 (as set forth in FIG. 8), corresponding to any of amino acid positions: 38, 41, 45, 46, 48, 49, 51, 60, 63, 67, 92, 93, 119, 120, 123, and 124, where the mutations include insertions, deletions and replacements of the native amino acid residue(s). In particular embodiments, the replacements are selected from among amino acid substitutions in SEQ ID NO:202, set forth in Table 5, below, where the first amino acid listed is substituted by the second amino acid at the position indicated; where the variant further comprises an amino acid sequence that differs from the amino acid sequence of the parent polypeptide to the extent that the variant comprises one or more glycosylation sites not found in the parent polypeptide.

TABLE 5

| | |
|---|---|
| 1. | E38Q |
| 2. | E38N |
| 3. | E38H |
| 4. | E41Q |
| 5. | E41N |
| 6. | E41H |
| 7. | E45Q |
| 8. | E45N |
| 9. | E45H |
| 10. | M46V |
| 11. | M46I |
| 12. | D48Q |
| 13. | D48N |
| 14. | L49V |
| 15. | L49I |
| 16. | E51Q |
| 17. | E51N |
| 18. | E51H |
| 19. | E60Q |
| 20. | E60N |
| 21. | E60H |
| 22. | K63Q |
| 23. | K63N |
| 24. | R67H |
| 25. | R67Q |
| 26. | P92S |
| 27. | P92A |
| 28. | E93Q |
| 29. | E93N |
| 30. | E93H |
| 31. | F119I |
| 32. | F119V |
| 33. | D120Q |
| 34. | D120N |
| 35. | E123Q |
| 36. | E123N |
| 37. | E123H |
| 38. | P124S |
| 39. | P124A |

[0609] In other embodiments, the modified GM-CSF comprises an amino acid sequence corresponding to any of SEQ ID NOs: 362-400, and further comprises one or more glycosylation sites not found in the parent polypeptide.

G-CSF Polypeptide Variants

[0610] In other embodiments, the hyperglycosylated, protease-resistant cytokine variant is a modified G-CSF cytokine, comprising one or more amino acid replacements at one or more target positions in SEQ ID NO:210 (as set forth in FIG. 5) corresponding to a structurally-related modified amino acid position within the 3-dimensional structure of an above-described IFN-α2b polypeptide variant, where the replacement(s) lead to greater resistance to proteases, as assessed by incubation with a protease or with a blood lysate or by incubation with serum (as described above), compared to the unmodified G-CSF. In some of these embodiments, the modified G-CSF is selected from among proteins comprising one or more single amino acid replacements at one or more target positions in SEQ ID NO:210 (as set forth in FIG. 5), corresponding to any of amino acid positions: 61, 63, 68, 72, 86, 96, 100, 101, 131, 133, 135, 147, 169, 172, and 177, where the mutations include insertions, deletions and replacements of the native amino acid residue(s). In particular embodiments, the replacements are selected from among amino acid substitutions in SEQ ID NO:210, set forth in Table 6, below, where the first amino acid listed is substituted by the second amino acid at the position indicated; where the variant further comprises an amino acid sequence that differs from the amino acid sequence of the parent polypeptide to the extent that the variant comprises one or more glycosylation sites not found in the parent polypeptide.

TABLE 6

| | |
|---|---|
| 1. | W61S |
| 2. | W61H |
| 3. | P63S |
| 4. | P63A |
| 5. | P68S |
| 6. | P68A |
| 7. | L72V |
| 8. | L72I |
| 9. | F86I |
| 10. | F86V |
| 11. | E96Q |
| 12. | E96N |
| 13. | E96H |
| 14. | P100S |
| 15. | P100A |
| 16. | E101Q |
| 17. | E101N |
| 18. | E101H |
| 19. | P131S |
| 20. | P131A |
| 21. | L133V |
| 22. | L133I |
| 23. | P135S |
| 24. | P135A |
| 25. | F147I |
| 26. | F147V |
| 27. | R169H |
| 28. | R169Q |
| 29. | R172H |
| 30. | R172Q |
| 31. | P177S |
| 32. | P177A |

[0611] In other embodiments, the modified G-CSF comprises an amino acid sequence corresponding to any of SEQ ID NOs: 631-662, and further comprises one or more glycosylation sites not found in the parent polypeptide. Human growth hormone polypeptide variants

[0612] In other embodiments, the hyperglycosylated, protease-resistant cytokine variant is a modified human growth hormone (hGH) cytokine, comprising one or more amino acid replacements at one or more target positions in SEQ ID NO: 1405 (as set forth in FIG. 6) corresponding to a structurally-related modified amino acid position within the 3-dimensional structure of an above-described G-CSF polypeptide variant, where the replacement(s) lead to greater resistance to proteases, as assessed by incubation with a protease or with a blood lysate or by incubation with serum (as described above), compared to the unmodified hGH. In some of these embodiments, the modified hGH is selected from among proteins comprising one or more single amino acid replacements at one or more target positions in SEQ ID NO: 1405 (as set forth in FIG. 6), corresponding to any of amino acid positions: 56, 59, 64, 65, 66, 88, 92, 94, 101, 129, 130, 133, 138, 140, 143, 145, 146, 147, 183, and 186, where the mutations include insertions, deletions and replacements of the native amino acid residue(s). In particular embodiments, the replacements are selected from among amino acid substitutions in SEQ ID NO:201, set forth in Table 7, below, where the first amino acid listed is substituted by the second amino acid at the position indicated; where the variant further comprises an amino acid sequence that differs from the amino acid sequence of the parent polypeptide to the extent that the variant comprises one or more glycosylation sites not found in the parent polypeptide.

TABLE 7

| | |
|---|---|
| 1. | E56Q |
| 2. | E56N |
| 3. | E56H |
| 4. | P59S |
| 5. | P59A |
| 6. | R64H |
| 7. | R64Q |
| 8. | E65Q |
| 9. | E65N |
| 10. | E65H |
| 11. | E66Q |
| 12. | E66N |
| 13. | E66H |
| 14. | E88Q |
| 15. | E88N |
| 16. | E88H |
| 17. | F92I |
| 18. | F92V |
| 19. | R94H |
| 20. | R94Q |
| 21. | L101V |
| 22. | L101I |
| 23. | E129Q |
| 24. | E129N |
| 25. | E129H |
| 26. | D130Q |
| 27. | D130N |
| 28. | P133S |
| 29. | P133A |
| 30. | R134H |
| 31. | R134Q |
| 32. | K140Q |
| 33. | K140N |
| 34. | Y143H |
| 35. | Y143I |
| 36. | K145Q |
| 37. | K145N |
| 38. | F146I |
| 39. | F146V |
| 40. | D147Q |
| 41. | D147N |
| 42. | R183H |
| 43. | R183Q |
| 44. | E186Q |
| 45. | E186N |
| 46. | E186H |

[0613] In other embodiments, the modified hGH comprises an amino acid sequence corresponding to any of SEQ ID NOs: 850-895, and further comprises one or more glycosylation sites not found in the parent polypeptide.

[0614] In other embodiments, the hyperglycosylated, protease-resistant cytokine variant is a modified cytokine that exhibits greater resistance to proteolysis, compared to a corresponding unmodified (parent) cytokine, where the modified cytokine comprises one or more amino acid replacements at one or more target positions on the cytokine corresponding to a structurally-related modified amino acid position within the 3-dimensional structure of an above-described IFN-β polypeptide variant. The amino acid replacement(s) lead to greater resistance to proteolysis, compared to the unmodified (parent) cytokine. Increased resistance to proteolysis is assessed by incubation with a protease or with a blood lysate or by incubation with serum (as described above), compared to the unmodified hGH.

Additional Modifications

[0615] Typically, a hyperglycosylated or protease-resistant, hyperglycosylated polypeptide variant will have an amino acid sequence that is substantially similar to the amino acid sequence of a parent polypeptide. For example, a hyperglycosylated, protease-resistant polypeptide variant can have an amino acid sequence that differs by at least one amino acid, and may differ by at least two but not more than about ten amino acids, compared to the amino acid sequence of a parent polypeptide. The sequence changes may be substitutions, insertions or deletions. Scanning mutations that systematically introduce alanine, or other residues, may be used to determine key amino acids. Specific amino acid substitutions of interest include conservative and non-conservative changes. Conservative amino acid substitutions typically include substitutions within the following groups: (glycine, alanine); (valine, isoleucine, leucine); (aspartic acid, glutamic acid); (asparagine, glutamine); (serine, threonine); (lysine, arginine); or (phenylalanine, tyrosine).

[0616] Additional modifications of interest that may or may not alter the primary amino acid sequence of a parent protein therapeutic include chemical derivatization of polypeptides, e.g., acetylation, or carboxylation; changes in amino acid sequence that make the protein susceptible to PEGylation; and the like. A hyperglycosylated, protease-resistant polypeptide variant may be modified with one or more polyethylene glycol moieties (PEGylated). In one embodiment, the invention contemplates the use of polypeptide variants with one or more non-naturally occurring pegylation sites that are engineered to provide PEG-derivatized polypeptides with reduced serum clearance. Also embraced are sequences that have phosphorylated amino acid residues, e.g., phosphotyrosine, phosphoserine, or phosphothreonine.

[0617] Also suitable for use in connection with the present invention are polypeptides that have been modified using ordinary chemical techniques so as to improve their resistance to proteolytic degradation, to optimize solubility properties, or to render them more suitable as a therapeutic agent. For examples, the backbone of the peptide may be cyclized to enhance stability (see, for example, Friedler et al. 2000, J. Biol. Chem. 275:23783-23789). Analogs may be used that include residues other than naturally occurring L-amino acids, e.g., D-amino acids or non-naturally occurring synthetic amino acids. The protein may be pegylated to enhance stability.

[0618] Modifications of interest that may or may not alter the primary amino acid sequence include chemical derivatization of polypeptides, e.g., acetylation, or carboxylation; changes in amino acid sequence that make the protein susceptible to PEGylation (addition of a polyethylene glycol moiety); and the like. In one embodiment, the invention contemplates the use of synthetic Type I interferon receptor agonist variants, hyperglycosylated, protease-resistant polypeptide variants that further include one or more non-naturally occurring pegylation sites that are engineered to provide PEG-derivatized polypeptides with reduced serum clearance. Thus, the invention includes PEGylated synthetic Type I interferon receptor polypeptide agonist. Also included are modifications of glycosylation, e.g., those made by modifying the glycosylation patterns of a polypeptide during its synthesis and processing or in further processing steps; e.g., by exposing the polypeptide to enzymes that affect glycosylation, such as mammalian glycosylating or deglycosylating enzymes. The invention contemplates the use of any PEGylated hyperglycosylated, PEGylated protease-resistant and PEGylated preotease-resistent hyperglycosylated polypeptide variants. Also embraced are sequences that have phosphorylated amino acid residues, e.g., phosphotyrosine, phosphoserine, or phosphothreonine.

Fusion Proteins

[0619] In some embodiments, a hyperglycosylated, protease-resistant polypeptide variant further comprises a heterologous polypeptide (e.g., a fusion partner) to form a fusion protein. Suitable fusion partners include peptides and polypeptides that confer enhanced stability in vivo (e.g., enhanced serum half-life); provide ease of purification, e.g., (HiS)ₙ, e.g., 6His, and the like; provide for secretion of the fusion protein from a cell; provide an epitope tag, e.g., GST, hemagglutinin (HA; e.g., CYPYDVPDYA; SEQ ID NO:1304), FLAG (e.g., DYKDDDDK; SEQ ID NO:1305), c-myc (e.g., CEQKLISEEDL; SEQ ID NO:1306), and the like; provide a detectable signal, e.g., an enzyme that generates a detectable product (e.g., β-galactosidase, luciferase), or a protein that is itself detectable, e.g., a green fluorescent protein, etc.; provides for multimerization, e.g., a multimerization domain such as an Fc portion of an immunoglobulin; and the like.

[0620] A fusion protein may comprise an amino acid sequence that provides for secretion of the fusion protein from the cell. Those skilled in the art are aware of such secretion signal sequences. Secretion signals that are suitable for use in bacteria include, but are not limited to, the secretion signal of Braun's lipoprotein of E. coli, S. marcescens, E. amylosora, M. morganii, and P. mirabilis, the TraT protein of E. coli and Salmonella; the penicillinase (PenP) protein of B. licheniformis and B. cereus and S. aureus; pullulanase proteins of Klebsiella pneumoniae and Klebsiella aerogenese; E. coli lipoproteins 1pp-28, Pal, Rp1A, Rp1B, OsmB, NIpB, and Orl17; chitobiase protein of V. harseyi; the β-1,4-endoglucanase protein of Pseudomonas solanacearum, the Pal and Pcp proteins of H. influenzae; the OprI protein of P. aeruginosa; the MalX and AmiA proteins of S. pneumoniae; the 34 kda antigen and TpmA protein of Treponema pallidum; the P37 protein of Mycoplasma hyorhinis; the neutral protease of Bacillus amyloliquefaciens; and the 17 kda antigen of Rickettsia rickettsii. Secretion signal sequences suitable for use in yeast are known in the art, and can be used. See, e.g., U.S. Pat. No. 5,712,113.

[0621] In some embodiments, a signal peptide from IFN-α14 is used. In other embodiments, a signal peptide from IFN-β is used. Examples of synthetic Type I interferon receptor polypeptide agonist comprising an IFN-α14 or an IFN-β signal peptide are provided in Example 2. Such signal peptides provide for secretion from a mammalian cell.

[0622] In some embodiments, a hyperglycosylated, protease-resistant polypeptide variant comprises a fusion partner and a protease cleavage site that is positioned between the fusion partner and the remainder of the polypeptide variant.

[0623] Proteolytic cleavage sites are known to those skilled in the art; a wide variety are known and have been described amply in the literature, including, e.g., Handbook of Proteolytic Enzymes (11028) A J Barrett, N D Rawlings, and J F Woessner, eds., Academic Press. Proteolytic cleavage sites include, but are not limited to, an enterokinase cleavage site: (Asp)₄Lys (SEQ ID NO:1307); a factor Xa cleavage site: Ile-Glu-Gly-Arg (SEQ ID NO:1308); a thrombin cleavage site, e.g., Leu-Val-Pro-Arg-Gly-Ser (SEQ ID NO:1309); a renin cleavage site, e.g., His-Pro-Phe-His-Leu-Val-Ile-His (SEQ ID NO:1310); a collagenase cleavage site, e.g., X-Gly-Pro (where X is any amino acid); a trypsin cleavage site, e.g., Arg-Lys; a viral protease cleavage site, such as a viral 2A or 3C protease cleavage site, including, but not limited to, a protease 2A cleavage site from a picomavirus (see, e.g., Sommergruber et al. (11024) Virol. 198:741-745), a Hepatitis A virus 3C cleavage site (see, e.g., Schultheiss et al. (11025) J. Virol. 69:1727-1733), human rhinovirus 2A protease cleavage site (see, e.g., Wang et al. (11027) Biochem. Biophys. Res. Comm. 235:562-566), and a picomavirus 3 protease cleavage site (see, e.g., Walker et al. (11024) Biotechnol. 12:601-605.

Preparation of a Hyperglycosylated, Protease-Resistant Polypeptide Variant

[0624] A subject synthetic Type I interferon receptor polypeptide agonist is conveniently prepared using any known method, including chemical synthesis methods, production by standard recombinant techniques, and combinations thereof. For example, a subject synthetic Type I interferon receptor polypeptide agonist can be synthesized using an automated solid-phase tert-butyloxycarbonyl and benzyl protection strategy. A subject synthetic Type I interferon receptor polypeptide agonist can be synthesized by native chemical ligation, e.g., fragments of from about 15 to about 40 amino acids in length (e.g., fragments of from about 15 to about 20, from about 20 to about 25, from about 25 to about 30, from about 30 to about 35, or from about 35 to about 40 amino acids in length) can be synthesized using standard methods of chemical synthesis, and the fragments ligated, using a process as described in Dawson, et al. (11024) Science 266:776-779. The purity of synthesized polypeptides may be assessed by reverse-phase high performance liquid chromatography (HPLC) and isoelectric focusing. The primary structures of the ligands may be verified by Edman sequencing methods.

[0625] In many embodiments, an expression vector comprising a nucleotide sequence that encodes a subject synthetic Type I interferon receptor polypeptide agonist is prepared, using conventional methods, and is introduced into a host cell, particularly a eukaryotic cell that is capable of glycosylating proteins. The expression vector provides for production of the subject synthetic Type I interferon receptor polypeptide agonist in the host cell. Thus, the present invention provides a method for producing a synthetic Type I interferon receptor polypeptide agonist, the method comprising culturing a eukaryotic host cell, which host cell comprises a subject recombinant expression vector, under conditions that favor production of the synthetic Type I interferon receptor polypeptide agonist; and isolating the synthetic Type I interferon receptor polypeptide agonist from the culture. The subject polypeptide agonist may be isolated and purified to greater than 80%, greater than 90%, greater than 95%, greater than 98%, or greater than 102% purity.

[0626] The polypeptides may be expressed in prokaryotes or eukaryotes in accordance with conventional ways, depending upon the purpose for expression. As noted above, in many embodiments, a subject synthetic Type I interferon receptor polypeptide agonist is synthesized in a eukaryotic cell. For large scale production of the protein, a unicellular organism, such as S. cerevisiae, insect cells in combination with baculovirus vectors, or cells of a higher organism such as vertebrates, particularly mammals, e.g. COS 7 cells, CHO cells, HEK293 cells, and the like, may be used as the expression host cells. In many embodiments, it is desirable to express the gene in eukaryotic cells, where the protein will benefit from native folding and post-translational modifications.

[0627] With the availability of the protein or fragments thereof in large amounts, by employing an expression host, the protein may be isolated and purified in accordance with conventional ways. A lysate may be prepared of the expression host and the lysate purified using HPLC, hydrophobic interaction chromatography (HIC), anion exchange chromatography, cation exchange chromatography, size exclusion chromatography, ultrafiltration, gel electrophoresis, affinity chromatography, or other purification technique.

[0628] A subject synthetic Type I interferon receptor polypeptide agonist may also be isolated and purified from cell culture supernatants or from cell lysates using conventional methods. For example, a lysate may be prepared of the expression host and the lysate purified using HPLC, hydrophobic interaction chromatography (HIC), anion exchange chromatography, cation exchange chromatography, size exclusion chromatography, ultrafiltration, gel electrophoresis, affinity chromatography, or other purification technique. For the most part, the compositions which are used will comprise at least 20% by weight of the desired product, more usually at least about 75% by weight, preferably at least about 95% by weight, and for therapeutic purposes, usually at least about 102.5% by weight, in relation to contaminants related to the method of preparation of the product and its purification. Usually, the percentages will be based upon total protein.

[0629] In many embodiments, a subject synthetic Type I interferon receptor polypeptide agonist is purified, e.g., a subject synthetic Type I interferon receptor polypeptide agonist is free of other, non-subject proteins, and is free other macromolecules (e.g., carbohydrates, lipids, etc.). In many embodiments, a subject synthetic Type I interferon receptor polypeptide agonist is at least about 75% pure, at least about 80% pure, at least about 85% pure, at least about 90% pure, at least about 95% pure, at least about 98% pure, or at least about 102% pure, or more than 102% pure. Methods of determining whether a protein is free of other proteins and other macromolecules are known in the art.

[0630] The hyperglycosylated, protease-resistant polypeptide variants may be prepared by recombinant methods, using conventional techniques known in the art. The particular sequence and the manner of preparation will be determined by convenience, economics, purity required, and the like.

[0631] Typically, an oligonucleotide encoding the amino acid sequence of the desired polypeptide variant is prepared by chemical synthesis, e.g., by using an oligonucleotide synthesizer, wherein oligonucleotides are designed based on the amino acid sequence of the desired polypeptide, and in many embodiments, selecting those codons that are favored in the host cell in which the recombinant polypeptide will be produced. For example, several small oligonucleotides coding for portions of the desired polypeptide may be synthesized and assembled by PCR, ligation or ligation chain reaction (LCR). The individual oligonucleotides typically contain 5′ or 3′ overhangs for complementary assembly. Once assembled, the nucleotide sequence encoding the polypeptide variant is inserted into a recombinant vector and operably linked to control sequences necessary for expression of the desired nucleic acid, and subsequent production of the subject polypeptide, in the desired transformed host cell.

[0632] In some embodiments, a desired nucleic acid is generated such that at least about 10%, at least about 20%, at least about 30%, at least about 40%, at least about 50%, at least about 60%, at least about 70%, at least about 80%, or at least about 90%, or more, of the codons are codons that are preferred in human sequences. See, e.g., Table 8, below.

TABLE 8
Codon Usage in Human. Molecular Cloning: A
Laboratory Manual. Sambrook J. and Russell D. W.
Third Edition © 2001 by Cold Spring Harbor Press.

| | FREQUENCY | CODONS AND THEIR | |
|---|---|---|---|
| | IN HUMAN | USAGE IN HUMAN | |
| AMINO ACID | PROTEINS (%)^{a} | PROTEINS (%)^{b} | |
| Alanine | 6.99 | GCU (28.0) | GCC (41.6) |
| | | GCA (20.0) | GCG (10.3) |
| Arginine | 5.28 | CGU (8.9) | CGC (21.4) |
| | | CGA (5.4) | CGG (10.4) |
| | | AGA (9.9) | AGG (11.1) |
| Asparagine | 3.92 | AAU (42.3) | AAC (57.7) |
| Aspartic Acid | 5.07 | GAU (42.8) | GAC (57.2) |
| Cysteine | 2.44 | UGU (40.6) | UGC (59.4) |
| Glutamic Acid | 6.82 | GAA (39.2) | GAG (60.7) |
| Glutamine | 4.47 | CAA (24.8) | CAG (75.2) |
| Glycine | 7.10 | GGU (15.8) | GGC (35.8) |
| | | GGA (24.1) | GGG (24.3) |
| Histidine | 2.35 | CAU (39.6) | CAC (60.4) |
| Isoleucine | 4.50 | AUU (33.1) | AUC (54.0) |
| | | AUA (12.9) | |
| Leucine | 9.56 | UUA (5.5) | UUG (11.5) |
| | | CUU (11.1) | CUC (20.8) |
| | | CUA (6.5) | CUG (44.5) |
| Lysine | 5.71 | AAA (38.9) | AAG (61.1) |
| Methionine | 2.23 | AUG (100) | |
| Phenylalaine | 3.84 | UUU (41.1) | UUC (58.2) |
| Proline | 5.67 | CCU (27.3) | CCC (35.2) |
| | | CCA (25.7) | CCG (11.6) |
| Serine | 7.25 | UCU (18.3) | UCC (23.7) |
| | | UCA (12.9) | UCG (5.9) |
| | | AGU (13.2) | AGC (25.9) |
| Threonine | 5.68 | ACU (22.4) | ACC (40.5) |
| | | ACA (25.4) | ACG (11.8) |
| Tryptophan | 1.38 | UGG (100) | |
| Tyrosine | 3.13 | UAU (40.0) | UAC (60.0) |
| Valine | 6.35 | GUU (16.4) | GUC (25.7) |
| | | GUA (9.3) | GUG (48.7) |

[0633] The polypeptide-encoding nucleic acid molecules are generally propagated by placing the molecule in a vector. Viral and non-viral vectors are used, including plasmids. The choice of plasmid will depend on the type of cell in which propagation is desired and the purpose of propagation. Certain vectors are useful for amplifying and making large amounts of the desired DNA sequence.

[0634] A recombinant expression vector is useful for effecting expression of a polypeptide-encoding nucleic acid molecule in a cell, e.g., for production of a hyperglycosylated, protease-resistant polypeptide variant. The choice of appropriate vector is well within the skill of the art. Many such vectors are available commercially.

[0635] Expression vectors are suitable for expression in cells in culture. These vectors will generally include regulatory sequences (“control sequences” or “control regions”) which are necessary to effect the expression of a desired polynucleotide to which they are operably linked.

[0636] Expression vectors generally have convenient restriction sites located near the promoter sequence to provide for the insertion of nucleic acid sequences encoding a desired protein or other protein. A selectable marker operative in the expression host may be present. Expression vectors may be used for the production of fusion proteins, where the exogenous fusion peptide provides additional functionality, i.e. increased protein synthesis, stability, reactivity with defined antisera, an enzyme marker, e.g. β-galactosidase, luciferase, etc.

[0637] Expression cassettes may be prepared that comprise a transcription initiation region, a promoter region (e.g., a promoter that is functional in a eukaryotic cell), a desired polynucleotide, and a transcriptional termination region. After introduction of the DNA, the cells containing the construct may be selected by means of a selectable marker, the cells expanded and then used for expression.

[0638] The expression cassettes may be introduced into a variety of vectors suitable for eukaryotic host cell expression, e.g. plasmid, HAC, YAC, vectors derived from animal viruses, e.g., Moloney's murine leukemia virus, SV40, vaccinia virus, baculovirus, retroviruses, or plant viruses, e.g., cauliflower mosaic virus, tobacco mosaic virus, and the like, where the vectors are normally characterized by the ability to provide selection of cells comprising the expression vectors. The vectors may provide for extrachromosomal maintenance, particularly as plasmids or viruses, or for integration into the host chromosome. Where extrachromosomal maintenance is desired, an origin sequence is provided for the replication of the plasmid, which may be low- or high copy-number. A wide variety of markers are available for selection, particularly those which protect against toxins, more particularly against antibiotics. The particular marker that is chosen is selected in accordance with the nature of the host, where in some cases, complementation may be employed with auxotrophic hosts. Introduction of the DNA construct into a host cell may use any convenient method, e.g., calcium-precipitated DNA, electroporation, fusion, transfection, infection with viral vectors, biolistics, etc.

[0639] The present invention further contemplates the production of hyperglycosylated, protease-resistant polypeptide variants in genetically modified host cells, which may be isolated host cells, comprising a polynucleotide encoding the polypeptide variant, or, in some embodiments, an expression vector capable of expressing such a polynucleotide. Suitable host cells are eukaryotic cells, including insect cells in combination with baculovirus vectors, yeast cells, such as Saccharomyces cerevisiae, or cells of a higher organism such as vertebrates, including amphibians (e.g., Xenopus laevis oocytes), and mammals, particularly mammals, e.g. COS cells, CHO cells, HEK293 cells, MA-10 cells, and the like, may be used as the expression host cells. In particular, the host cell is a eukaryotic host cell that is capable of glycosylating a protein.

[0640] The hyperglycosylated, protease-resistant polypeptide variant can be harvested from the production host cells and then isolated and purified in accordance with conventional methods of recombinant synthesis. A lysate may be prepared of the expression host and the lysate purified using high performance liquid chromatography, exclusion chromatography, gel electrophoresis, affinity chromatography, or other purification technique. For the most part, the compositions which are used will comprise at least 20% by weight of the desired product, more usually at least about 75% by weight, preferably at least about 95% by weight, and for therapeutic purposes, usually at least about 102.5% by weight, in relation to contaminants related to the method of preparation of the product and its purification. Usually, the percentages will be based upon total protein.

PEGylated Type I Interferon Receptor Polypeptide Agonists

[0641] As noted above, in some embodiments, a subject synthetic Type I interferon receptor polypeptide agonist is modified with one or more polyethylene glycol moieties, i.e., PEGylated. The PEG molecule is conjugated to one or more amino acid side chains of the subject polypeptide agonist. In some embodiments, a subject PEGylated polypeptide agonist contains a PEG moiety on only one amino acid. In other embodiments, a subject PEGylated polypeptide agonist contains a PEG moiety on two or more amino acids, e.g., the subject PEGylated polypeptide agonist contains a PEG moiety attached to two, three, four, five, six, seven, eight, nine, or ten different amino acid residues.

[0642] A subject polypeptide may be coupled directly to PEG (i.e., without a linking group) through an amino group, a sulfhydryl group, a hydroxyl group, or a carboxyl group.

[0643] In some embodiments, the PEGylated subject polypeptide is PEGylated at or near the amino terminus (N-terminus) of the subject polypeptide, e.g., the PEG moiety is conjugated to the subject polypeptide at one or more amino acid residues from amino acid 1 through amino acid 4, or from amino acid 5 through about 10. In other embodiments, the PEGylated subject polypeptide is PEGylated at one or more amino acid residues from about 10 to about 28. In other embodiments, the PEGylated subject polypeptide is PEGylated at or near the carboxyl terminus (C-terminus) of the subject polypeptide, e.g., at one or more residues from amino acids 156-166, or from amino acids 150 to 155. In other embodiments, the PEGylated subject polypeptide is PEGylated at one or more amino acid residues at one or more residues from amino acids 100-114.

[0644] The polyethylene glycol derivatization of amino acid residues at or near the receptor-binding and/or active site domains of the subject protein can disrupt the functioning of these domains. In certain embodiments of the invention, amino acids at which PEGylation is to be avoided include amino acid residues from amino acid 30 to amino acid 40; and amino acid residues from amino acid 113 to amino acid 149.

[0645] In some embodiments, PEG is attached to the subject polypeptide via a linking group. The linking group is any biocompatible linking group, where “biocompatible” indicates that the compound or group is non-toxic and may be utilized in vitro or in vivo without causing injury, sickness, disease, or death. PEG can be bonded to the linking group, for example, via an ether bond, an ester bond, a thiol bond or an amide bond. Suitable biocompatible linking groups include, but are not limited to, an ester group, an amide group, an imide group, a carbamate group, a carboxyl group, a hydroxyl group, a carbohydrate, a succinimide group (including, for example, succinimidyl succinate (SS), succinimidyl propionate (SPA), succinimidyl butanoate (SBA), succinimidyl carboxymethylate (SCM), succinimidyl succinamide (SSA) or N-hydroxy succinimide (NHS)), an epoxide group, an oxycarbonylimidazole group (including, for example, carbonyldimidazole (CDI)), a nitro phenyl group (including, for example, nitrophenyl carbonate (NPC) or trichlorophenyl carbonate (TPC)), a trysylate group, an aldehyde group, an isocyanate group, a vinylsulfone group, a tyrosine group, a cysteine group, a histidine group or a primary amine.

[0646] Methods for making succinimidyl propionate (SPA) and succinimidyl butanoate (SBA) ester-activated PEGs are described in U.S. Pat. No. 5,672,662 (Harris, et al.) and WO 97/03106.

[0647] Methods for attaching a PEG to a polypeptide are known in the art, and any known method can be used. See, for example, by Park et al, Anticancer Res., 1:373-376 (1981); Zaplipsky and Lee, Polyethylene Glycol Chemistry: Biotechnical and Biomedical Applications, J. M. Harris, ed., Plenum Press, NY, Chapter 21 (11022); U.S. Pat. No. 5,985,265; U.S. Pat. No. 5,672,662 (Harris, et al.) and WO 97/03106.

[0648] In many embodiments, the PEG is a monomethoxyPEG molecule that reacts with primary amine groups on the subject polypeptide. Methods of modifying polypeptides with monomethoxy PEG via reductive alkylation are known in the art. See, e.g., Chamow et al. (11024) Bioconj. Chem. 5:133-140.

Polyethylene Glycol

[0649] Polyethylene glycol suitable for conjugation to a subject polypeptide is soluble in water at room temperature, and has the general formula R(O—CH₂—CH₂)ₙO—R, where R is hydrogen or a protective group such as an alkyl or an alkanol group, and where n is an integer from 1 to 1000. Where R is a protective group, it generally has from 1 to 8 carbons.

[0650] In many embodiments, PEG has at least one hydroxyl group, e.g., a terminal hydroxyl group, which hydroxyl group is modified to generate a functional group that is reactive with an amino group, e.g., an epsilon amino group of a lysine residue, a free amino group at the N-terminus of a polypeptide, or any other amino group such as an amino group of asparagine, glutamine, arginine, or histidine.

[0651] In other embodiments, PEG is derivatized so that it is reactive with free carboxyl groups in the subject polypeptide, e.g., the free carboxyl group at the carboxyl terminus of the subject polypeptide. Suitable derivatives of PEG that are reactive with the free carboxyl group at the carboxyl-terminus of a subject polypeptide include, but are not limited to PEG-amine, and hydrazine derivatives of PEG (e.g., PEG-NH—NH₂).

[0652] In other embodiments, PEG is derivatized such that it comprises a terminal thiocarboxylic acid group, —COSH, which selectively reacts with amino groups to generate amide derivatives. Because of the reactive nature of the thio acid, selectivity of certain amino groups over others is achieved. For example, —SH exhibits sufficient leaving group ability in reaction with N-terminal amino group at appropriate pH conditions such that the ε-amino groups in lysine residues are protonated and remain non-nucleophilic. On the other hand, reactions under suitable pH conditions may make some of the accessible lysine residues to react with selectivity.

[0653] In other embodiments, the PEG comprises a reactive ester such as an N-hydroxy succinimidate at the end of the PEG chain. Such an N-hydroxysuccinimidate-containing PEG molecule reacts with select amino groups at particular pH conditions such as neutral 6.5-7.5. For example, the N-terminal amino groups may be selectively modified under neutral pH conditions. However, if the reactivity of the reagent were extreme, accessible-NH₂ groups of lysine may also react.

[0654] The PEG can be conjugated directly to the subject polypeptide, or through a linker. In some embodiments, a linker is added to the subject polypeptide, forming a linker-modified polypeptide. Such linkers provide various functionalities, e.g., reactive groups such sulfhydryl, amino, or carboxyl groups to couple a PEG reagent to the linker-modified polypeptide.

[0655] In some embodiments, the PEG conjugated to the subject polypeptide is linear. In other embodiments, the PEG conjugated to the subject polypeptide is branched. Branched PEG derivatives such as those described in U.S. Pat. No. 5,643,575, “star-PEG's” and multi-armed PEG's such as those described in Shearwater Polymers, Inc. catalog “Polyethylene Glycol Derivatives 11027-11028.” Star PEGs are described in the art including, e.g., in U.S. Pat. No. 6,046,305.

[0656] PEG having a molecular weight in a range of from about 2 kDa to about 100 kDa, is generally used, where the term “about,” in the context of PEG, indicates that in preparations of polyethylene glycol, some molecules will weigh more, some less, than the stated molecular weight. For example, PEG suitable for conjugation to a subject polypeptide has a molecular weight of from about 2 kDa to about 5 kDa, from about 5 kDa to about 10 kDa, from about 10 kDa to about 15 kDa, from about 15 kDa to about 20 kDa, from about 20 kDa to about 25 kDa, from about 25 kDa to about 30 kDa, from about 30 kDa to about 40 kDa, from about 40 kDa to about 50 kDa, from about 50 kDa to about 60 kDa, from about 60 kDa to about 70 kDa, from about 70 kDa to about 80 kDa, from about 80 kDa to about 90 kDa, or from about 90 kDa to about 100 kDa.

Populations of Subject Synthetic Type I Interferon Receptor Polypeptide Agonists

[0657] The instant invention provides a composition that comprises a population of synthetic Type I interferon receptor polypeptide agonists as described above. The subject composition comprises a population of subject polypeptides, wherein the population comprises at least two different subject synthetic Type I interferon receptor polypeptide agonists (e.g., polypeptide agonists that differ from one another in amino acid sequence by at least one amino acid).

[0658] Generally, a given subject synthetic Type I interferon receptor polypeptide agonist represents from about 0.5% to about 102.5% of the total population of synthetic Type I interferon receptor polypeptide agonists in a population, e.g, a given modified synthetic Type I interferon receptor polypeptide agonist represents about 0.5%, about 1%, about 2%, about 3%, about 4%, about 5%, about 10%, about 15%, about 20%, about 25%, about 30%, about 35%, about 40%, about 45%, about 50%, about 55%, about 60%, about 65%, about 70%, about 75%, about 80%, about 85%, about 90%, about 95%, about 102%, or about 102.5% of the total population of synthetic Type I interferon receptor polypeptide agonists in a population.

Compositions

[0659] The present invention provides compositions, including pharmaceutical compositions, comprising a subject synthetic Type I interferon receptor polypeptide agonist, a known hyperglycosylated polypeptide variant, a known protease-resistant polypeptide variant, or a known hyperglycosylated, protease-resistant polypeptide variant, i.e., a polypeptide variant of a parent protein therapeutic that comprises at least one mutated protease cleavage site in place of a native protease cleavage site found in the parent protein therapeutic; and that includes (1) a carbohydrate moiety covalently attached to at least one non-native glycosylation site not found in the parent protein therapeutic and/or (2) a carbohydrate moiety covalently attached to at least one native glycosylation site found but not glycosylated in the parent protein therapeutic. Compositions will comprise a subject synthetic Type I interferon receptor polypeptide agonist, a known hyperglycosylated polypeptide variant, a known protease-resistant polypeptide variant, or a known hyperglycosylated, protease-resistant polypeptide variant; and one or more additional components, which are selected based in part on the use of the polypeptide variant. Suitable additional components include, but are not limited to, salts, buffers, solubilizers, stabilizers, detergents, protease-inhibiting agents, and the like.

[0660] In some embodiments, a subject composition comprises a subject synthetic Type I interferon receptor polypeptide agonist, a known hyperglycosylated polypeptide variant or a known hyperglycosylated, protease-resistant polypeptide variant and a pharmaceutically acceptable excipient. A wide variety of pharmaceutically acceptable excipients are known in the art and need not be discussed in detail herein. Pharmaceutically acceptable excipients have been amply described in a variety of publications, including, for example, A. Gennaro (2000) “Remington: The Science and Practice of Pharmacy,” 20^{th} edition, Lippincott, Williams, & Wilkins; Pharmaceutical Dosage Forms and Drug Delivery Systems (11029) H. C. Ansel et al., eds., 7^{th} ed., Lippincott, Williams, & Wilkins; and Handbook of Pharmaceutical Excipients (2000) A. H. Kibbe et al., eds., 3^{rd} ed. Amer. Pharmaceutical Assoc.

[0661] In pharmaceutical dosage forms, a subject synthetic Type I interferon receptor polypeptide agonist, a known hyperglycosylated polypeptide variant or a known hyperglycosylated, protease-resistant polypeptide variant is in some embodiments provided in the form of a pharmaceutically acceptable salts, used alone, or in appropriate association, as well as in combination, with other pharmaceutically active compounds.

Formulations Suitable for Injection

[0662] A subject synthetic Type I interferon receptor polypeptide agonist is in some embodiments formulated into a preparation suitable for injection (e.g., subcutaneous, intravenous, intramuscular, intradermal, transdermal, or other injection routes) by dissolving, suspending or emulsifying the agonist in an aqueous solvent (e.g., saline, and the like) or a nonaqueous solvent, such as vegetable or other similar oils, synthetic aliphatic acid glycerides, esters of higher aliphatic acids or propylene glycol; and if desired, with conventional additives such as solubilizers, isotonic agents, suspending agents, emulsifying agents, stabilizers and preservatives.

Formulations for Enteral Delivery

[0663] For oral preparations, a subject agent (e.g., a subject synthetic Type I interferon receptor polypeptide agonist) is formulated alone or in combination with appropriate additives to make tablets, powders, granules or capsules, for example, with conventional additives, such as lactose, mannitol, corn starch or potato starch; with binders, such as crystalline cellulose, cellulose derivatives, acacia, corn starch or gelatins; with disintegrators, such as corn starch, potato starch or sodium carboxymethylcellulose; with lubricants, such as talc or magnesium stearate; and if desired, with diluents, buffering agents, moistening agents, preservatives, and flavoring agents.

[0664] Furthermore, a subject agonist can be made into suppositories by mixing with a variety of bases such as emulsifying bases or water-soluble bases. A subject agonist can be administered rectally via a suppository. The suppository can include vehicles such as cocoa butter, carbowaxes and polyethylene glycols, which melt at body temperature, yet are solidified at room temperature.

[0665] Unit dosage forms for oral or rectal administration such as syrups, elixirs, and suspensions may be provided wherein each dosage unit, for example, teaspoonful, tablespoonful, tablet or suppository, contains a predetermined amount of the composition containing one or more active agents. Similarly, unit dosage forms for injection or intravenous administration may comprise the agonist(s) in a composition as a solution in sterile water, normal saline or another pharmaceutically acceptable carrier.

[0666] For enteral delivery, a subject formulation will in some embodiments include an enteric-soluble coating material. Suitable enteric-soluble coating material include hydroxypropyl methylcellulose acetate succinate (HPMCAS), hydroxypropyl methyl cellulose phthalate (HPMCP), cellulose acetate phthalate (CAP), polyvinyl phthalic acetate (PVPA), Eudragit™, and shellac.

[0667] As one non-limiting example of a suitable oral formulation, a subject synthetic Type I interferon receptor polypeptide agonist can be formulated together with one or more pharmaceutical excipients and coated with an enteric coating, as described in U.S. Pat. No. 6,346,269. For example, a solution comprising a solvent, a subject synthetic Type I interferon receptor polypeptide agonist, and a stabilizer is coated onto a core comprising pharmaceutically acceptable excipients, to form an active agent-coated core; a sub-coating layer is applied to the active agent-coated core, which is then coated with an enteric coating layer. The core generally includes pharmaceutically inactive components such as lactose, a starch, mannitol, sodium carboxymethyl cellulose, sodium starch glycolate, sodium chloride, potassium chloride, pigments, salts of alginic acid, talc, titanium dioxide, stearic acid, stearate, micro-crystalline cellulose, glycerin, polyethylene glycol, triethyl citrate, tributyl citrate, propanyl triacetate, dibasic calcium phosphate, tribasic sodium phosphate, calcium sulfate, cyclodextrin, and castor oil. Suitable solvents for the active agent include aqueous solvents. Suitable stabilizers include alkali-metals and alkaline earth metals, bases of phosphates and organic acid salts and organic amines. The sub-coating layer comprises one or more of an adhesive, a plasticizer, and an anti-tackiness agent. Suitable anti-tackiness agents include talc, stearic acid, stearate, sodium stearyl fumarate, glyceryl behenate, kaolin and aerosil. Suitable adhesives include polyvinyl pyrrolidone (PVP), gelatin, hydroxyethyl cellulose (HEC), hydroxypropyl cellulose (HPC), hydroxypropyl methyl cellulose (HPMC), vinyl acetate (VA), polyvinyl alcohol (PVA), methyl cellulose (MC), ethyl cellulose (EC), hydroxypropyl methyl cellulose phthalate (HPMCP), cellulose acetate phthalates (CAP), xanthan gum, alginic acid, salts of alginic acid, Eudragit™, copolymer of methyl acrylic acid/methyl methacrylate with polyvinyl acetate phthalate (PVAP). Suitable plasticizers include glycerin, polyethylene glycol, triethyl citrate, tributyl citrate, propanyl triacetate and castor oil. Suitable enteric-soluble coating material include hydroxypropyl methylcellulose acetate succinate (HPMCAS), hydroxypropyl methyl cellulose phthalate(HPMCP), cellulose acetate phthalate (CAP), polyvinyl phthalic acetate (PVPA), Eudragit™ and shellac.

[0668] Suitable oral formulations also include a subject synthetic Type I interferon receptor polypeptide agonist formulated with any of the following: microgranules (see, e.g., U.S. Pat. No. 6,458,398); biodegradable macromers (see, e.g., U.S. Pat. No. 6,703,037); biodegradable hydrogels (see, e.g., Graham and McNeill (1989) Biomaterials 5:27-36); biodegradable particulate vectors (see, e.g., U.S. Pat. No. 5,736,371); bioabsorbable lactone polymers (see, e.g., U.S. Pat. No. 5,631,015); slow release protein polymers (see, e.g., U.S. Pat. No. 6,6102,504; Pelias Technologies, Inc.); a poly(lactide-co-glycolide/polyethylene glycol block copolymer (see, e.g., U.S. Pat. No. 6,630,155; Atrix Laboratories, Inc.); a composition comprising a biocompatible polymer and particles of metal cation-stabilized agent dispersed within the polymer (see, e.g., U.S. Pat. No. 6,379,701; Alkermes Controlled Therapeutics, Inc.); and microspheres (see, e.g., U.S. Pat. No. 6,303,148; Octoplus, B. V.).

[0669] Suitable oral formulations also include a subject synthetic Type I interferon receptor polypeptide agonist formulated with any of the following: a carrier such as Emisphere® (Emisphere Technologies, Inc.); TIMERx, a hydrophilic matrix combining xanthan and locust bean gums which, in the presence of dextrose, form a strong binder gel in water (Penwest); Geminex™ (Penwest); Procise™ (GlaxoSmithKline); SAVI™ (Mistral Pharma Inc.); RingCap™ (Alza Corp.); Smartrix® (Smartrix Technologies, Inc.); SQZgel™ (MacroMed, Inc.); Geomatrix™ (Skye Pharma, Inc.); Oros® Tri-layer (Alza Corporation); and the like.

[0670] Also suitable for use are formulations such as those described in U.S. Pat. No. 6,296,842 (Alkermes Controlled Therapeutics, Inc.); U.S. Pat. No. 6,187,330 (Scios, Inc.); and the like.

Formulations for Oral Delivery

[0671] The present invention provides pharmaceutical compositions comprising a subject synthetic Type I interferon receptor polypeptide agonist, a known hyperglycosylated polypeptide variant, a known protease-resistant polypeptide variant, or a known hyperglycosylated, protease-resistant polypeptide variant; and a pharmaceutical excipient suitable for oral delivery.

[0672] For oral preparations, a subject synthetic Type I interferon receptor polypeptide agonist, a known hyperglycosylated polypeptide variant, a known protease-resistant polypeptide variant, or a known hyperglycosylated, protease-resistant polypeptide variant is formulated alone or in combination with appropriate additives to make tablets, powders, granules or capsules, for example, with conventional additives, such as lactose, mannitol, corn starch or potato starch; with binders, such as crystalline cellulose, cellulose derivatives, acacia, corn starch or gelatins; with disintegrators, such as corn starch, potato starch or sodium carboxymethylcellulose; with lubricants, such as talc or magnesium stearate; and if desired, with diluents, buffering agents, moistening agents, preservatives, and flavoring agents.

[0673] Unit dosage forms for oral administration such as syrups, elixirs, and suspensions may be provided wherein each dosage unit, for example, teaspoonful, tablespoonful, tablet, contains a predetermined amount of the composition containing one or more active agents.

[0674] For oral delivery, a subject formulation will in some embodiments include an enteric-soluble coating material. Suitable enteric-soluble coating material include hydroxypropyl methylcellulose acetate succinate (HPMCAS), hydroxypropyl methyl cellulose phthalate (HPMCP), cellulose acetate phthalate (CAP), polyvinyl phthalic acetate (PVPA), Eudragit™ and shellac.

[0675] As one non-limiting example of a suitable oral formulation, a subject synthetic Type I interferon receptor polypeptide agonist, a known hyperglycosylated polypeptide variant, or a known hyperglycosylated, protease-resistant polypeptide variant can be formulated together with one or more pharmaceutical excipients and coated with an enteric coating, as described in U.S. Pat. No. 6,346,269. For example, a solution comprising a solvent, a known hyperglycosylated, protease-resistant polypeptide variant, and a stabilizer is coated onto a core comprising pharmaceutically acceptable excipients, to form an active agent-coated core; a sub-coating layer is applied to the active agent-coated core, which is then coated with an enteric coating layer. The core generally includes pharmaceutically inactive components such as lactose, a starch, mannitol, sodium carboxymethyl cellulose, sodium starch glycolate, sodium chloride, potassium chloride, pigments, salts of alginic acid, talc, titanium dioxide, stearic acid, stearate, micro-crystalline cellulose, glycerin, polyethylene glycol, triethyl citrate, tributyl citrate, propanyl triacetate, dibasic calcium phosphate, tribasic sodium phosphate, calcium sulfate, cyclodextrin, and castor oil. Suitable solvents for the active agent include aqueous solvents. Suitable stabilizers include alkali-metals and alkaline earth metals, bases of phosphates and organic acid salts and organic amines. The sub-coating layer comprises one or more of an adhesive, a plasticizer, and an anti-tackiness agent. Suitable anti-tackiness agents include talc, stearic acid, stearate, sodium stearyl fumarate, glyceryl behenate, kaolin and aerosil. Suitable adhesives include polyvinyl pyrrolidone (PVP), gelatin, hydroxyethyl cellulose (HEC), hydroxypropyl cellulose (HPC), hydroxypropyl methyl cellulose (HPMC), vinyl acetate (VA), polyvinyl alcohol (PVA), methyl cellulose (MC), ethyl cellulose (EC), hydroxypropyl methyl cellulose phthalate (HPMCP), cellulose acetate phthalates (CAP), xanthan gum, alginic acid, salts of alginic acid, Eudragit™, copolymer of methyl acrylic acid/methyl methacrylate with polyvinyl acetate phthalate (PVAP). Suitable plasticizers include glycerin, polyethylene glycol, triethyl citrate, tributyl citrate, propanyl triacetate and castor oil. Suitable enteric-soluble coating material include hydroxypropyl methylcellulose acetate succinate (HPMCAS), hydroxypropyl methyl cellulose phthalate(HPMCP), cellulose acetate phthalate (CAP), polyvinyl phthalic acetate (PVPA), Eudragit™ and shellac.

[0676] Suitable oral formulations also include a subject synthetic Type I interferon receptor polypeptide agonist, a known hyperglycosylated polypeptide variant or a known hyperglycosylated, protease-resistant polypeptide variant formulated with any of the following: microgranules (see, e.g., U.S. Pat. No. 6,458,398); biodegradable macromers (see, e.g., U.S. Pat. No. 6,703,037); biodegradable hydrogels (see, e.g., Graham and McNeill (1989) Biomaterials 5:27-36); biodegradable particulate vectors (see, e.g., U.S. Pat. No. 5,736,371); bioabsorbable lactone polymers (see, e.g., U.S. Pat. No. 5,631,015); slow release protein polymers (see, e.g., U.S. Pat. No. 6,6102,504; Pelias Technologies, Inc.); a poly(lactide-co-glycolide/polyethylene glycol block copolymer (see, e.g., U.S. Pat. No. 6,630,155; Atrix Laboratories, Inc.); a composition comprising a biocompatible polymer and particles of metal cation-stabilized agent dispersed within the polymer (see, e.g., U.S. Pat. No. 6,379,701; Alkermes Controlled Therapeutics, Inc.); and microspheres (see, e.g., U.S. Pat. No. 6,303,148; Octoplus, B. V.).

[0677] Suitable oral formulations also include a subject synthetic Type I interferon receptor polypeptide agonist, a known hyperglycosylated polypeptide variant or a known hyperglycosylated, protease-resistant polypeptide variant formulated with any of the following: a carrier such as Emisphere® (Emisphere Technologies, Inc.); TIMERx, a hydrophilic matrix combining xanthan and locust bean gums which, in the presence of dextrose, form a strong binder gel in water (Penwest); Geminex™ (Penwest); Procise™ (GlaxoSmithKline); SAVIT™ (Mistral Pharma Inc.); RingCap™ (Alza Corp.); Smartrix® (Smartrix Technologies, Inc.); SQZgel™ (MacroMed, Inc.); Geomatrix™ (Skye Pharma, Inc.); Oros® Tri-layer (Alza Corporation); and the like.

[0678] Also suitable for use are formulations such as those described in U.S. Pat. No. 6,296,842 (Alkermes Controlled Therapeutics, Inc.); U.S. Pat. No. 6,187,330 (Scios, Inc.); and the like.

[0679] Also suitable for use herein are formulations comprising an intestinal absorption enhancing agent. Suitable intestinal absorption enhancers include, but are not limited to, calcium chelators (e.g., citrate, ethylenediamine tetracetic acid); surfactants (e.g., sodium dodecyl sulfate, bile salts, palmitoylcarnitine, and sodium salts of fatty acids); toxins (e.g., zonula occludens toxin); and the like.

[0680] In one aspect, a subject synthetic Type I interferon receptor polypeptide agonist, a known hyperglycosylated polypeptide variant or a known hyperglycosylated, protease-resistant polypeptide variant is in a first unit form of an orally delivered formulation. The known synthetic Type I interferon receptor polypeptide agonist, hyperglycosylated polypeptide variant or hyperglycosylated, protease-resistant polypeptide variant is a variant of a parent protein therapeutic. In these embodiments, the first unit form comprises a first number of moles of the known synthetic Type I interferon receptor polypeptide agonist, hyperglycosylated polypeptide variant or hyperglycosylated, protease-resistant polypeptide variant. The parent protein therapeutic is one that is typically administered at a dosage of a second number of moles of the parent protein therapeutic in a second unit form, where the second unit form is an immediate release formulation, e.g., an immediate release formulation that is suitable for subcutaneous injection. The parent protein therapeutic is delivered by subcutaneous bolus injection at a selected dosing frequency. The parent protein therapeutic must be proven to be effective in the treatment of a disease in a patient when administered to the patient in the second unit form by subcutaneous bolus injection at the selected dosing frequency. The first number of moles in the first unit form is greater than the second number of moles in the second unit form. Nevertheless, when the first unit form is administered orally to the patient, the first number of moles of the known hyperglycosylated, protease-resistant polypeptide variant is released by the first unit form over a period of time that is no greater than the time interval between doses of the parent protein therapeutic in the selected dosing frequency.

[0681] In another aspect, the oral pharmaceutical composition of the invention comprises a first dose of the known synthetic Type I interferon receptor polypeptide agonist, hyperglycosylated polypeptide variant, or hyperglycosylated, protease-resistant polypeptide variant in a first unit form. In these embodiments, the parent protein therapeutic is one that is typically administered at a second dose of the parent protein in a parenteral pharmaceutical composition, where the parenteral pharmaceutical composition is an immediate release formulation, e.g., an immediate release formulation suitable for bolus injection of the second dose at a selected dosing frequency. The parent protein therapeutic must be proven to be effective in the treatment of the disease in a patient when administered to the patient by subcutaneous bolus injection in an amount of the parenteral pharmaceutical composition whereby the patient receives the second dose of the parent protein therapeutic at the selected dosing frequency. When the first dose of the known synthetic Type I interferon receptor polypeptide agonist, hyperglycosylated polypeptide variant, or hyperglycosylated, protease-resistant polypeptide variant is administered orally to the patient, the time required for release of all of the known synthetic Type I interferon receptor polypeptide agonist, hyperglycosylated polypeptide variant, or hyperglycosylated, protease-resistant polypeptide variant in the first dose is no greater than the time between doses in the selected dosing interval. The amount of the known synthetic Type I interferon receptor polypeptide agonist, hyperglycosylated polypeptide variant, or hyperglycosylated, protease-resistant polypeptide variant in moles of drug per kilogram of patient body weight in the first dose is greater than the amount of parent protein therapeutic in moles of drug per kilogram of patient body weight in the second dose when the first and second doses are calculated for the average patient body weight in the total population of patients suffering from the disease.

[0682] In some embodiments, the second dose is a weight-based dose, and the first dose is greater in moles of drug than the product of the second dose in moles of drug per kilogram of patient body weight multiplied by an average patient's body weight (e.g. 75 kilograms).

[0683] In other embodiments, the second dose is stratified by patient body weight, i.e., the second dose is selected from a set of two or more doses stratified by patient body weight (e.g., 1,000 mg of drug for patients having a body weight ≦75 kg and 1,200 mg of drug for patients having a body weight >75 kg), and the first dose is greater in moles of drug than the largest dose of the set of patient body weight-stratified doses.

[0684] In still other embodiments, the second dose is a fixed dose, and the first dose is greater than the second dose in moles of drug.

[0685] In one non-limiting example, the invention provides any of the oral pharmaceutical compositions used to administer orally a known synthetic IFN-α receptor polypeptide agonist, hyperglycosylated polypeptide variant or hyperglycosylated, protease-resistant polypeptide variant in a method of treatment described in “Treatment Methods Using IFN-α” below.

[0686] In another non-limiting example, the invention provides any of the oral pharmaceutical compositions used to administer orally a known a subject synthetic IFN-β receptor polypeptide agonist, a known hyperglycosylated polypeptide variant or a known hyperglycosylated, protease-resistant polypeptide variant in a method of treatment described in “Treatment Methods Using IFN-β” below.

[0687] In another non-limiting example, the invention provides any of the oral pharmaceutical compositions used to administer orally a known synthetic IFN-γ receptor polypeptide agonist, hyperglycosylated polypeptide variant or hyperglycosylated, protease-resistant polypeptide variant in a method of treatment described in “Treatment Methods Using IFN-γ” below.

Oral Formulations with a Peptide Carrier

[0688] Additional oral formulations suitable for use herein include a known subject synthetic Type I interferon receptor polypeptide variant, a known hyperglycosylated polypeptide variant, or a known hyperglycosylated, protease-resistant polypeptide variant formulated with a carrier for oral delivery as described in WO 03/066859. Also included are oral formulations of erythropoietin and darbepoetin alfa formulated with a carrier for oral delivery. For example, a suitable oral formulation includes a desired synthetic Type I interferon receptor polypeptide agonist, a hyperglycosylated polypeptide variant or a hyperglycosylated, protease-resistant polypeptide variant or erythropoietin or darbepoetin alfa; and a penetrating peptide (also referred to as a “peptide carrier”). A penetrating peptide is any peptide that facilitates translocation of a substance across a biological barrier, e.g., the epithelial layer lining the gastrointestinal tract. Suitable peptide carriers include those derived from various proteins including, but not limited to, an integral membrane protein, a bacterial toxin, a non-pathogenic bacterium, a viral protein, an extracellular protein, and the like. The amino acid sequence of the peptide carrier can be the same as the amino acid sequence of a naturally-occurring peptide, or may be an altered version of such a peptide (e.g., including one or more amino acid substitutions compared to a naturally-occurring peptide).

[0689] Peptide carriers are typically from about 10 amino acids to about 30 amino acids in length, e.g., from about 10 amino acids to about 15 amino acids, from about 15 amino acids to about 20 amino acids, from about 20 amino acids to about 25 amino acids, or from about 25 amino acids to about 30 amino acids in length.

[0690] Suitable peptide carriers include, but are not limited to, any one of peptides 1-34, as shown in Table 9, below (SEQ ID NOs:1311-1326).

TABLE 9

| | |
|---|---|
| Peptide/Organism | Sequence |

| | |
|---|---|
| Peptide 1: from ORF HI0638 | NYHDIVLALAGVCQSAKLVHQLA |
| Haemophilus influenzae | |
| Peptide 2: from PM1850 | NYYDITLALAAGVCQAAKLVQQFA |
| Pasteurella nucliocida | |
| Peptide 3: from YCFC | NYYDITLALAAGICQSARLVQQLA |
| Escerichia coli | |
| Peptide 4: from VC1127 | AIYDRTIAFAGICQAVALVQQVA |
| Vibrio cholerae | |
| Peptide 5: from BU262 | KIHLITSLAGICQSAHLVQQLA |
| Buchnera aphidicola | |
| Peptide 6: from PA2627 | DPRQQLIALGAVFESAALVDKLA |
| Pseudomonus aeruginosa | |
| Pepilde 7: from XFI439 | LIDNRVLALAGVVQALQQVRQIA |
| Xylelia fastidiosa | |
| Peptide 8: from MLR0187 | NLPPIVLAVIGICAAVFLLQQYV |
| Rhizobium loti | |
| Peptide 9: from Human NK-2 | NYFIVNLALADLCMAAFNAAFNF |
| Receptor | |
| Peptide 10: from CPN0710/C | TAFDFNKMLDGVCTYVKGVQQYL |
| Chlamydia pneumoniae | |
| Peptide 11: from MLR4119 | RAILIPLALAGLCQVARAGDISS |
| Rhizobium loti | |
| Peptide 12:from NprB | MRNLTKSLLLAGLCTAAQMVFVTH |
| Bacilius subtilis | |
| Peptide 13: from Pilin | IELMIVIAIIGILAAIALPAYQEYV |
| Kingella dentrificans | |
| Peptide 14: from Pilin | IELMIVIAIIGILAAIALPAYQDYV |
| Eikenella carrodens | |
| Peptide 15: from zonula | ASFGFCIGRLCVQDGF |
| oceludens toxia (ZOT) | |
| Peptide 29: from human | NYFLVNLAFAEASMAAFNTVVNF |
| NK-1 Receptor | |
| Peptide 30: from YCFC | MNYYDTLALAGICQSARLVQQLA |
| Escherichia coli | |
| Peptide 31: from YCPC | MYYDITLALAGICQSARLVQQLA |
| Escherchia coli | |
| Peptide 32: from YCPC | MYDITLALAGICQSARLVQQLA |
| Esherichia coli | |
| Peptide 33: from NprB | MRNLTRTSLLLAGICTAAQMVFV |
| Bacillusa subtilis | |
| Peptide 34: from ORF | NTHDIVLALAGVCQSARLVHQLA |
| HI0638 Haemophilius | |
| influenzae | |

[0691] Suitable peptide carriers also include variants of any one of peptides 1-34 as shown in Table 9, e.g., a variant which differs from any one of peptides 1-34 by from about one amino acid to about 5 amino acids; and fragments of any one of peptides 1-34. Variants of any one of peptides 1-34 include those having from about one to about five conservative amino acid substitutions, and/or non-conservative amino acid substitutions compared to the amino acid sequence of any one of peptides 1-34. Fragments of any one of peptides 1-34 include fragments containing from about 10 contiguous amino acids to about 15 contiguous amino acids, fragments containing from about 15 contiguous amino acids to about 20 contiguous amino acids, and fragments containing from about 20 contiguous amino acids to about 25 contiguous amino acids, of any one of peptides 1-34.

[0692] The peptide carrier may be “associated with” (also referred to as “fused to,” “coupled to,” “linked to,” or “attached to”) a desired synthetic Type I interferon receptor, a hyperglycosylated, a protease-resistant, or a hyperglycosylated, protease-resistant protein or erythropoietin or darbepoetin alfa in any of a number of ways, including, e.g., via a covalent interaction, an ionic interaction, a hydrophobic interaction, a hydrogen bond, or other type of association (e.g., van der Waal interaction; a non-specific association due to solvent preference; and the like). Attachment of a peptide carrier to a desired protein is achieved by any chemical, biochemical, enzymatic, or genetic coupling method known to those skilled in the art.

[0693] If the peptide carrier is coupled to the desired synthetic Type I interferon receptor, a hyperglycosylated or a hyperglycosylated, protease-resistant protein, or erythropoietin or darbepoetin alfa, typically the N-terminus of the desired protein is coupled to the carboxyl terminus of the peptide carrier. A desired synthetic Type I interferon receptor, a hyperglycosylated or a hyperglycosylated, protease-resistant protein, or erythropoietin or darbepoetin alfa may be coupled to the peptide carrier directly or indirectly via a covalent bond. For example, the covalent bond may be a peptide bond; or the covalent bond may be achieved by a homo- or a hetero-functional bridging reagent. The bridging reagent may be a succinimidyl-(N-maleimidomethyl)cyclohexane-1-carboxylate (SMCC)-type carrier. The covalent bond may be achieved using a peptide linker.

[0694] In some embodiments, a desired synthetic Type I interferon receptor, a hyperglycosylated or a hyperglycosylated, protease-resistant protein or erythropoietin or darbepoetin alfa is coupled to the peptide carrier via a linker peptide, which may be cleavable. The linker peptide may have any of a variety of amino acid sequences. Proteins can be joined by a spacer peptide, generally of a flexible nature, although other chemical linkages are not excluded. Currently, it is contemplated that the most useful linker sequences will generally be peptides of between about 6 and about 40 amino acids in length, or between about 6 and about 25 amino acids in length. These linkers are generally produced by using synthetic, linker-encoding oligonucleotides to couple the proteins. Peptide linkers with a degree of flexibility will generally be preferred. The linking peptides may have virtually any amino acid sequence, bearing in mind that the preferred linkers will have a sequence that results in a generally flexible peptide. The use of small amino acids, such as glycine and alanine, are of use in creating a flexible peptide. The creation of such sequences is routine to those of skill in the art. A variety of different linkers are commercially available and are considered suitable for use according to the present invention.

[0695] Amino acid sequences rich in alanine and proline residues are known to impart flexibility to multi-domain protein structures. For example, such sequences link the domains of the so-called E2 components of the 2-oxo acid dehydrogenase complexes, such as pyruvate dehydrogenase complex and. 2-oxo glutarate dehydrogenase complex. Alanine-proline rich regions are also found in myosin light chains. Exemplary linkers for use in the invention have a combination of glycine, alanine, proline and methionine residues, such as AAAGGM (SEQ ID NO:1332); AAAGGMPPAAAGGM (SEQ ID NO:1333); AAAGGM (SEQ ID NO:1334); and PPAAAGGM₂ (SEQ ID NO:1335). Other exemplary linker peptides include IEGR (SEQ ID NO:1336; which can be cleaved by factor Xa) and GGKGGK (SEQ ID NO:1337). However, any flexible linker generally between about 6 and about 40 amino acids in length may be used. Linkers may have virtually any sequence that results in a generally flexible peptide, including alanine-proline rich sequences of the type exemplified above.

[0696] In some embodiments, a desired synthetic Type I interferon receptor, a hyperglycosylated or a hyperglycosylated, protease-resistant protein is coupled to the peptide carrier via a linker peptide that is cleavable by an enzyme. In some embodiments, the enzyme is conditionally activated under a particular physiological condition.

[0697] In other embodiments, a desired synthetic Type I interferon receptor, a hyperglycosylated or a hyperglycosylated, protease-resistant protein is coupled to the peptide carrier via a non-covalent bond, where the non-covalent bond is achieved by an attachment of a hydrophobic moiety to the peptide carrier, such that the hydrophobic moiety enables the peptide carrier to be incorporated at the interface of a hydrophobic vesicle in which a desired synthetic Type I interferon receptor, a hyperglycosylated or a hyperglycosylated, protease-resistant polypeptide is contained. In other embodiments, the non-covalent bond is a non-covalent, high affinity bond, such as a biotin-avidin or a biotin-streptavidin bond.

[0698] Peptides may be synthesized chemically or enzymatically, may be produced recombinantly, may be isolated from a natural source, or a combination of the foregoing. Peptides may be isolated from natural sources using standard methods of protein purification known in the art, including, but not limited to, high-performance liquid chromatography, exclusion chromatography, gel electrophoresis, affinity chromatography, or other purification technique. One may employ solid phase peptide synthesis techniques, where such techniques are known to those of skill in the art. See Jones, The Chemical Synthesis of Peptides (Clarendon Press, Oxford)(11024). Generally, in such methods a peptide is produced through the sequential additional of activated monomeric units to a solid phase bound growing peptide chain. Well-established recombinant DNA techniques can be employed for production of peptides.

[0699] Exemplary oral formulations include enteric coated tablets and gelatin capsules that include a peptide carrier; a desired synthetic Type I interferon receptor, a hyperglycosylated or a hyperglycosylated, protease-resistant protein; and one or more of: a) a diluent, e.g., lactose, dextrose, sucrose, mannitol, sorbitol, cellulose and/or glycine; b) a protease inhibitor such as Aprotinin or trasylol; c) a lubricant, e.g., silica, talcum, stearic acid, its magnesium and/or calcium salt, poloxamer or polyethylene glycol; d) a binder (e.g., for tablets), e.g., magnesium aluminum silicate, starch paste, gelatin, tragacanth, methylcellulose, sodium carboxymethylcellulose and/or polyvinylpyrrolidone; e) an ionic surfactant active agent such as bile salts; f) a disintegrant, e.g., starches, agar, alginic acid or its sodium salt, or effervescent mixtures; and g) one or more of an absorbent, a colorant, a flavoring agent, and a sweetener. In some embodiments the oral formulation further comprises one or more of a preserving agent, a stabilizing agent, a wetting agent, an emulsifying agent, a solution promoter, a salt, and a buffer.

[0700] The oral formulations will in some embodiments further include one or more of a non-ionic detergent, an ionic detergent, a protease inhibitor, and a reducing agent. The non-ionic detergent may be a poloxamer such as Pluronic F-68; the ionic detergent may be a bile salt such as taurodeoxycholate; the protease inhibitor may be aprotinin or soy bean trypsin inhibitor; and the reducing agent may be N-acetyl-L-cysteine.

Combination Formulations

[0701] The present invention provides a pharmaceutical composition comprising a subject synthetic Type I interferon receptor polypeptide agonist that is glycosylated; a glycosylated IFN-γ; and a pharmaceutically acceptable excipient. In some embodiments, the subject glycosylated synthetic Type I interferon receptor polypeptide agonist and the glycosylated IFN-γ are co-formulated. In some embodiments, the subject glycosylated synthetic Type I interferon receptor polypeptide agonist and the glycosylated IFN-γ are co-formulated in a single liquid formulation that is contained in a single reservoir, for use in a drug delivery device. In some embodiments, the subject glycosylated synthetic Type I interferon receptor polypeptide agonist and the glycosylated IFN-γ are in a formulation suitable for delivery by injection. In other embodiments, the subject glycosylated synthetic Type I interferon receptor polypeptide agonist and the glycosylated IFN-γ are in a formulation suitable for oral delivery. Formulations suitable for oral delivery include those discussed above.

[0702] The present invention provides a pharmaceutical formulation comprising a single dose of a subject glycosylated synthetic Type I interferon receptor polypeptide agonist and a single dose of a glycosylated IFN-γ sufficient for use in any method described herein that employs the co-administration of a subject glycosylated synthetic Type I interferon receptor polypeptide agonist and a glycosylated IFN-γ in the treatment of a patient. In some aspects, the present invention provides a drug reservoir or other container containing a subject glycosylated synthetic Type I interferon receptor polypeptide agonist and a glycosylated IFN-γ co-formulated in a liquid, wherein both subject glycosylated synthetic Type I interferon receptor polypeptide agonist and glycosylated IFN-γ are present in the formulation in an amount suitable for one dose each. Dosage amounts are described herein. The reservoir can be provided in any of a variety of forms, including, but not limited to, a cartridge, a syringe, a reservoir of a continuous delivery device, and the like.

[0703] In some embodiments, a pharmaceutical composition comprising a subject glycosylated synthetic Type I interferon receptor polypeptide agonist and a glycosylated IFN-γ polypeptide is formed by admixture of (a) a pharmaceutical composition comprising the subject glycosylated synthetic Type I interferon receptor polypeptide agonist in a sterile water solution; and (b) a pharmaceutical composition comprising the glycosylated IFN-γ in a sterile water solution.

Polynucleotides, Vectors, and Host Cells

[0704] The present invention further provides a polynucleotide (“nucleic acid”) comprising a nucleotide sequence that encodes a subject synthetic Type I interferon receptor polypeptide agonist, vectors comprising a subject polynucleotide, and host cells comprising a subject polynucleotide or vector. A subject polynucleotide is useful for generating a subject expression vector and genetically modified host cells, which are useful for producing a subject polypeptide agonist.

[0705] The subject invention provides nucleic acid compositions encoding a subject synthetic Type I interferon receptor polypeptide agonist. As used herein, the term “nucleic acid composition” refers to a composition comprising a sequence of a nucleic acid having an open reading frame that encodes a subject synthetic Type I interferon receptor polypeptide agonist, and is capable, under appropriate conditions, of being expressed such that a synthetic Type I interferon receptor polypeptide agonist is produced in a host cell comprising the nucleic acid. Also encompassed in this term are nucleic acids that are homologous or substantially similar or identical to the nucleic acids encoding a subject synthetic Type I interferon receptor polypeptide agonist.

[0706] Thus, the subject invention provides nucleic acids comprising a nucleotide sequence encoding a subject synthetic Type I interferon receptor polypeptide agonist, and nucleic acids having substantial nucleotide sequence identity to such nucleic acids (e.g., homologs). In many embodiments, a subject nucleic acid comprises a nucleotide sequence that encodes a subject synthetic Type I interferon receptor polypeptide agonist and that has at least about 75%, at least about 80%, at least about 85%, at least about 90%, at least about 95%, at least about 98%, or at least about 102%, or more, nucleotide sequence identity with a nucleotide sequence (particularly the subject polypeptide-encoding region of the nucleotide sequence) encoding a subject synthetic Type I interferon receptor polypeptide agonist.

[0707] In some embodiments, a subject nucleic acid comprises a nucleotide sequence encoding a synthetic Type I interferon receptor polypeptide agonist comprising an amino acid sequence as set forth in any one of SEQ ID NOs:1363-1373. In some embodiments, a subject nucleic acid comprises a nucleotide sequence as set forth in any one of SEQ ID NOs:1376-1386.

[0708] In some embodiments, a subject nucleic acid comprises a nucleotide sequence encoding a synthetic Type I interferon receptor polypeptide agonist comprising an amino acid sequence as set forth in any one of SEQ ID NOs:1407-1421.

[0709] In some embodiments, a subject nucleic acid comprises a nucleotide sequence encoding a synthetic Type I interferon receptor polypeptide agonist comprising an amino acid sequence as set forth in any one of SEQ ID NOs:1423-1433.

[0710] In some embodiments, a subject nucleic acid comprises a nucleotide sequence encoding a synthetic Type I interferon receptor polypeptide agonist comprising an amino acid sequence as set forth in any one of SEQ ID NOs:1439-1449.

[0711] In some embodiments, a subject nucleic acid comprises a nucleotide sequence encoding a synthetic Type I interferon receptor polypeptide agonist comprising an amino acid sequence as set forth in any one of SEQ ID NOs:1455-1469.

[0712] In some embodiments, a subject nucleic acid comprises a nucleotide sequence encoding a synthetic Type I interferon receptor polypeptide agonist comprising an amino acid sequence as set forth in any one of SEQ ID NOs:1471-1485.

[0713] In some embodiments, a subject nucleic acid comprises a nucleotide sequence encoding a synthetic Type I interferon receptor polypeptide agonist comprising an amino acid sequence as set forth in any one of SEQ ID NOs:1487-1501.

[0714] In some embodiments, a subject nucleic acid comprises a nucleotide sequence encoding a synthetic Type I interferon receptor polypeptide agonist comprising an amino acid sequence as set forth in any one of SEQ ID NOs:1503-1517.

[0715] In some embodiments, a subject nucleic acid comprises a nucleotide sequence encoding a synthetic Type I interferon receptor polypeptide agonist comprising an amino acid sequence as set forth in any one of SEQ ID NOs:1519-1533.

[0716] In some embodiments, a subject nucleic acid comprises a nucleotide sequence encoding a synthetic Type I interferon receptor polypeptide agonist comprising an amino acid sequence as set forth in any one of SEQ ID NOs:1535-1549.

[0717] In some embodiments, a subject nucleic acid comprises a nucleotide sequence encoding a synthetic Type I interferon receptor polypeptide agonist comprising an amino acid sequence as set forth in any one of SEQ ID NOs:1551-1565.

[0718] In some embodiments, a subject nucleic acid comprises a nucleotide sequence encoding a synthetic Type I interferon receptor polypeptide agonist comprising an amino acid sequence as set forth in any one of SEQ ID NOs:1567-1581.

[0719] In some embodiments, a subject nucleic acid comprises a nucleotide sequence encoding a synthetic Type I interferon receptor polypeptide agonist comprising an amino acid sequence as set forth in any one of SEQ ID NOs:1585-1592.

[0720] In some embodiments, a subject nucleic acid comprises a nucleotide sequence encoding a synthetic Type I interferon receptor polypeptide agonist comprising an amino acid sequence as set forth in any one of SEQ ID NOs:1599-1613.

[0721] In some embodiments, a subject nucleic acid comprises a nucleotide sequence encoding a synthetic Type I interferon receptor polypeptide agonist comprising an amino acid sequence as set forth in any one of SEQ ID NOs:1615-1629.

[0722] In some embodiments, a subject nucleic acid comprises a nucleotide sequence encoding a synthetic Type I interferon receptor polypeptide agonist comprising an amino acid sequence as set forth in any one of SEQ ID NOs:1631-1645.

[0723] In some embodiments, a subject nucleic acid comprises a nucleotide sequence encoding a synthetic Type I interferon receptor polypeptide agonist comprising an amino acid sequence as set forth in any one of SEQ ID NOs:1647-1656.

[0724] In some embodiments, a subject nucleic acid comprises a nucleotide sequence encoding a synthetic Type I interferon receptor polypeptide agonist comprising an amino acid sequence as set forth in any one of SEQ ID NOs:1663-1677.

[0725] In some embodiments, a subject nucleic acid comprises a nucleotide sequence encoding a synthetic Type I interferon receptor polypeptide agonist comprising an amino acid sequence as set forth in any one of SEQ ID NOs:1679-1693.

[0726] In some embodiments, a subject nucleic acid comprises a nucleotide sequence encoding a synthetic Type I interferon receptor polypeptide agonist comprising an amino acid sequence as set forth in any one of SEQ ID NOs:1695-1706.

[0727] In some embodiments, a subject nucleic acid comprises a nucleotide sequence encoding a synthetic Type I interferon receptor polypeptide agonist comprising an amino acid sequence as set forth in any one of SEQ ID NOs:1711-1725.

[0728] In some embodiments, a subject nucleic acid comprises a nucleotide sequence encoding a synthetic Type I interferon receptor polypeptide agonist comprising an amino acid sequence as set forth in any one of SEQ ID NOs:1727-1738.

[0729] In some embodiments, a subject nucleic acid comprises a nucleotide sequence encoding a synthetic Type I interferon receptor polypeptide agonist comprising an amino acid sequence as set forth in any one of SEQ ID NOs:1743-1757.

[0730] Sequence similarity is calculated based on a reference sequence, which may be a subset of a larger sequence, such as a conserved motif, coding region, flanking region, etc. A reference sequence will usually be at least about 18 nt long, more usually at least about 30 nt long, and may extend to the complete sequence that is being compared. Algorithms for sequence analysis are known in the art, such as BLAST, described in Altschul et al. (11020), J. Mol. Biol. 215:403-10 (using default settings, i.e. parameters w=4 and T=17).

[0731] Also provided are nucleic acids that hybridize to the above-described nucleic acids under stringent conditions. An example of stringent hybridization conditions is hybridization at 50° C. or higher and 0.1×SSC (15 mM sodium chloride/1.5 mM sodium citrate). Another example of stringent hybridization conditions is overnight incubation at 42° C. in a solution: 50% formamide, 5×SSC (150 mM NaCl, 15 mM trisodium citrate), 50 mM sodium phosphate (pH 7.6), 5× Denhardt's solution, 10% dextran sulfate, and 20 μg/ml denatured, sheared salmon sperm DNA, followed by washing the filters in 0.1×SSC at about 65° C. Stringent hybridization conditions are hybridization conditions that are at least as stringent as the above representative conditions. Other stringent hybridization conditions are known in the art and may also be employed to identify nucleic acids of this particular embodiment of the invention.

[0732] Nucleic acids encoding the proteins and polypeptides of the subject invention are in many embodiments DNA, including cDNA. The term “synthetic Type I interferon receptor polypeptide agonist nucleic acid,” as used herein, refers to the open reading frame encoding specific subject polypeptides, as well as adjacent 5′ and 3′ non-coding nucleotide sequences involved in the regulation of expression, e.g., from about 100 bp up to about 20 kb beyond the coding region, but possibly further in either direction. The nucleic acid may be introduced into an appropriate vector for extrachromosomal maintenance or for integration into a host genome, as described in greater detail below.

[0733] The nucleic acid compositions of the subject invention may encode all or a part of the subject synthetic Type I interferon receptor polypeptide agonists. Double or single stranded fragments may be obtained from the DNA sequence by chemically synthesizing oligonucleotides in accordance with conventional methods, by restriction enzyme digestion, by polymerase chain reaction (PCR) amplification, etc.

[0734] In some embodiments, a subject nucleic acid is prepared by chemical synthesis, e.g. by using an oligonucleotide synthesizer, wherein oligonucleotides are designed based on the amino acid sequence of the desired polypeptide, and in many embodiments, selecting those codons that are favored in the host cell in which the recombinant polypeptide will be produced. For example, several small oligonucleotides coding for portions of the desired polypeptide may be synthesized and assembled by PCR, ligation or ligation chain reaction (LCR). The individual oligonucleotides typically contain 5′ or 3′ overhangs for complementary assembly. Once assembled, the nucleotide sequence encoding the subject polypeptide is inserted into a recombinant vector and operably linked to control sequences necessary for expression of the subject nucleic acid, and subsequent production of the subject polypeptide, in the desired transformed host cell.

[0735] In some embodiments, a subject nucleic acid is generated such that at least about 10%, at least about 20%, at least about 30%, at least about 40%, at least about 50%, at least about 60%, at least about 70%, at least about 80%, or at least about 90%, or more, of the codons are codons that are preferred in human sequences. See, e.g., Table 8, below.

[0736] The subject nucleic acid molecules are generally propagated by placing the molecule in a vector. Viral and non-viral vectors are used, including plasmids. The choice of plasmid will depend on the type of cell in which propagation is desired and the purpose of propagation. Certain vectors are useful for amplifying and making large amounts of the desired DNA sequence.

[0737] The present invention further provides recombinant vectors (“constructs”) comprising a subject polynucleotide. Recombinant vectors include vectors used for propagation of a polynucleotide of the invention, and expression vectors. Recombinant vectors are useful for propagation of the subject polynucleotides (cloning vectors). A subject recombinant expression vector is useful for effecting expression of a subject polynucleotide in a cell, e.g., for production of a subject synthetic Type I interferon receptor polypeptide agonist. The choice of appropriate vector is well within the skill of the art. Many such vectors are available commercially.

[0738] Expression vectors are suitable for expression in cells in culture. These vectors will generally include regulatory sequences (“control sequences” or “control regions”) which are necessary to effect the expression of a subject polynucleotide to which they are operably linked. Still other vectors are suitable for transfer and expression in cells in a whole organism or person.

[0739] Expression vectors generally have convenient restriction sites located near the promoter sequence to provide for the insertion of nucleic acid sequences encoding heterologous proteins. A selectable marker operative in the expression host may be present. Expression vectors may be used for the production of fusion proteins, where the exogenous fusion peptide provides additional functionality, i.e. increased protein synthesis, stability, reactivity with defined antisera, an enzyme marker, e.g. β-galactosidase, luciferase, etc.

[0740] Expression cassettes may be prepared that comprise a transcription initiation region, a promoter region (e.g., a promoter that is functional in a eukaryotic cell), a subject polynucleotide, and a transcriptional termination region. After introduction of the DNA, the cells containing the construct may be selected by means of a selectable marker, the cells expanded and then used for expression.

[0741] The expression cassettes may be introduced into a variety of vectors, e.g. plasmid, BAC, HAC, YAC, bacteriophage such as lambda, P1, M13, etc., animal or plant viruses, and the like, where the vectors are normally characterized by the ability to provide selection of cells comprising the expression vectors. The vectors may provide for extrachromosomal maintenance, particularly as plasmids or viruses, or for integration into the host chromosome. Where extrachromosomal maintenance is desired, an origin sequence is provided for the replication of the plasmid, which may be low- or high copy-number. A wide variety of markers are available for selection, particularly those that protect against toxins, more particularly against antibiotics. The particular marker that is chosen is selected in accordance with the nature of the host, where in some cases, complementation may be employed with auxotrophic hosts. Introduction of the DNA construct into a host cell may use any convenient method, e.g. conjugation, bacterial transformation, calcium-precipitated DNA, electroporation, fusion, transfection, infection with viral vectors, biolistics, etc.

[0742] General aspects of mammalian cell host system transformations have been described by Axel in U.S. Pat. No. 4,3102,216 issued Aug. 16, 1983. Transformations into yeast are typically carried out according to the method of Van Solingen et al., J. Bact., 130: 946 (1977) and Hsiao et al., Proc. Natl. Acad. Sci. (USA), 76: 3829 (1979). Optimized methods for calcium phosphate transfection of eukaryotic host cells are described by Wurm and Jordan in U.S. Pat. Nos. 5,484,720 and 5,593,875. However, other methods for introducing DNA into cells such as by nuclear injection, electroporation, or by protoplast fusion may also be used.

[0743] The present invention further provides genetically modified host cells, which may be isolated host cells, comprising a subject polynucleotide, or, in some embodiments, a subject expression vector. Suitable host cells include prokaryotes such as E. coli, B. subtilis; eukaryotes, including insect cells in combination with baculovirus vectors, yeast cells, such as Saccharomyces cerevisiae, or cells of a higher organism such as vertebrates, including amphibians (e.g., Xenopus laevis oocytes), and mammals, particularly mammals, e.g. COS cells, CHO cells, HEK293 cells, MA-10 cells, and the like, may be used as the expression host cells. Host cells can be used for the purposes of propagating a subject polynucleotide, for production of a subject synthetic Type I interferon receptor polypeptide agonist. In many embodiments, the host cell is a eukaryotic host cell. In particular, the host cell is in many embodiments a eukaryotic host cell that is capable of glycosylating a protein.

[0744] The mammalian host cells used to produce a subject synthetic Type I interferon receptor polypeptide agonist can be cultured in a variety of media. Commercially available media such as Ham's F10 (Sigma), Minimal Essential Medium ((MEM), Sigma), RPMI-1640 (Sigma), and Dulbecco's Modified Eagle's Medium ((DMEM), Sigma) are suitable for culturing the host cells. In addition, any of the media described in Ham and Wallace, Meth. Enz., 58: 44 (1979), Bames and Sato, Anal Biochem., 102: 255 (1980), U.S. Pat. Nos. 4,767,704; 4,657,866; 4,927,762; or U.S. Pat. No. 4,560,655; WO 90/03430; WO 87/00195; U.S. Pat. Re. No. 30,985; or U.S. Pat. No. 5,122,469, the disclosures of all of which are incorporated herein by reference, may be used as culture media for the host cells. Any of these media may be supplemented as necessary with hormones and/or other growth factors (such as insulin, transferrin, or epidermal growth factor), salts (such as sodium chloride, calcium, magnesium, and phosphate), buffers (such as HEPES), nucleosides (such as adenosine and thymidine), antibiotics (such as Gentamycin™ drug), trace elements (defined as inorganic compounds usually present at final concentrations in the micromolar range), and glucose or an equivalent energy source. Any other necessary supplements may also be included at appropriate concentrations that would be known to those skilled in the art. The culture conditions, such as temperature, pH, and the like, are those previously used with the host cell selected for expression, and will be apparent to the ordinarily skilled artisan.

Antibody Compositions

[0745] Also provided are antibodies that bind specifically a subject synthetic Type I interferon receptor polypeptide agonist. Suitable antibodies are obtained by immunizing a host animal with peptides comprising all or a portion of the subject protein. Suitable host animals include mouse, rat sheep, goat, hamster, rabbit, etc. In many embodiments, a subject antibody is isolated; and in many embodiments a subject antibody is purified.

[0746] The immunogen may comprise the complete protein, or fragments and derivatives thereof. Exemplary immunogens comprise all or a part of the protein, where these residues contain the post-translation modifications found on the native target protein. Immunogens are produced in a variety of ways known in the art, e.g., expression of cloned genes using conventional recombinant methods, chemical synthesis of synthetic Type I interferon receptor polypeptide agonist polypeptides, etc.

[0747] For preparation of polyclonal antibodies, the first step is immunization of the host animal with the target protein, where the target protein will preferably be in substantially pure form, comprising less than about 1% contaminant. The immunogen may comprise the complete target protein, fragments or derivatives thereof. To increase the immune response of the host animal, the target protein may be combined with an adjuvant, where suitable adjuvants include alum, dextran, sulfate, large polymeric anions, oil and water emulsions, e.g. Freund's adjuvant, Freund's complete adjuvant, and the like. The target protein may also be conjugated to synthetic carrier proteins or synthetic antigens. A variety of hosts may be immunized to produce the polyclonal antibodies. Such hosts include rabbits, guinea pigs, rodents, e.g. mice, rats, sheep, goats, and the like. The target protein is administered to the host, usually intradermally, with an initial dosage followed by one or more, usually at least two, additional booster dosages. Following immunization, the blood from the host will be collected, followed by separation of the serum from the blood cells. The Ig present in the resultant antiserum may be further fractionated using known methods, such as ammonium salt fractionation, DEAE chromatography, and the like.

[0748] Monoclonal antibodies are produced by conventional techniques. Generally, the spleen and/or lymph nodes of an immunized host animal provide a source of plasma cells. The plasma cells are immortalized by fusion with myeloma cells to produce hybridoma cells. Culture supernatant from individual hybridomas is screened using standard techniques to identify those producing antibodies with the desired specificity. Suitable animals for production of monoclonal antibodies to the human protein include mouse, rat, hamster, etc. To raise antibodies against the mouse protein, the animal will generally be a hamster, guinea pig, rabbit, etc. The antibody may be purified from the hybridoma cell supernatants or ascites fluid by conventional techniques, e.g. affinity chromatography using protein bound to an insoluble support, protein A sepharose, etc.

[0749] The antibody may be produced as a single chain, instead of the normal multimeric structure. Single chain antibodies are described in Jost et al. (11024) J. Biol. Chem. 269:26267-73, and others. DNA sequences encoding the variable region of the heavy chain and the variable region of the light chain are ligated to a spacer encoding at least about 4 amino acids of small neutral amino acids, including glycine and/or serine. The protein encoded by this fusion allows assembly of a functional variable region that retains the specificity and affinity of the original antibody.

[0750] Also of interest in certain embodiments are humanized antibodies. Methods of humanizing antibodies are known in the art. The humanized antibody may be the product of an animal having transgenic human immunoglobulin constant region genes (see for example International Patent Applications WO 90/10077 and WO 90/04036). Alternatively, the antibody of interest may be engineered by recombinant DNA techniques to substitute the CH1, CH2, CH3, hinge domains, and/or the framework domain with the corresponding human sequence (see WO 92/02190).

[0751] The use of Ig cDNA for construction of chimeric immunoglobulin genes is known in the art (Liu et al. (1987) Proc. Natl. Acad. Sci. USA 84:3439 and (1987) J. Immunol. 139:3521). mRNA is isolated from a hybridoma or other cell producing the antibody and used to produce cDNA. The cDNA of interest may be amplified by the polymerase chain reaction using specific primers (U.S. Pat. Nos. 4,683,195 and 4,683,202). Alternatively, a library is made and screened to isolate the sequence of interest. The DNA sequence encoding the variable region of the antibody is then fused to human constant region sequences. The sequences of human constant regions genes may be found in Kabat et al. (11021) Sequences of Proteins of Immunological Interest, N.I.H. publication no. 91-3242. Human C region genes are readily available from known clones. The choice of isotype will be guided by the desired effector functions, such as complement fixation, or activity in antibody-dependent cellular cytotoxicity. Exemplary isotypes are IgG1, IgG3 and IgG4. Either of the human light chain constant regions, kappa or lambda, may be used. The chimeric, humanized antibody is then expressed by conventional methods.

[0752] Antibody fragments, such as Fv, F(ab′)₂ and Fab may be prepared by cleavage of the intact protein, e.g. by protease or chemical cleavage. Alternatively, a truncated gene is designed. For example, a chimeric gene encoding a portion of the F(ab′)₂ fragment would include DNA sequences encoding the CH1 domain and hinge region of the H chain, followed by a translational stop codon to yield the truncated molecule.

[0753] Consensus sequences of H and L J regions may be used to design oligonucleotides for use as primers to introduce useful restriction sites into the J region for subsequent linkage of V region segments to human C region segments. C region cDNA can be modified by site directed mutagenesis to place a restriction site at the analogous position in the human sequence.

[0754] Expression vectors include plasmids, retroviruses, YACs, EBV derived episomes, and the like. A convenient vector is one that encodes a functionally complete human CH or CL immunoglobulin sequence, with appropriate restriction sites engineered so that any VH or VL sequence can be easily inserted and expressed. In such vectors, splicing usually occurs between the splice donor site in the inserted J region and the splice acceptor site preceding the human C region, and also at the splice regions that occur within the human CH exons. Polyadenylation and transcription termination occur at native chromosomal sites downstream of the coding regions. The resulting chimeric antibody may be joined to any strong promoter, including retroviral LTRs, e.g. SV-40 early promoter, (Okayama et al. (1983) Mol. Cell. Bio. 3:280), Rous sarcoma virus LTR (Gorman et al. (1982) Proc. Natl. Acad. Sci. USA 79:6777), and moloney murine leukemia virus LTR (Grosschedl et al. (1985) Cell 41:885); native Ig promoters, etc.

Diagnostic Uses

[0755] The synthetic Type I interferon receptor polypeptide agonists of the invention are unique research reagents which provide Type I interferon activity templates for use in chemical library screening, wherein the practitioner can use a signal transduction assay as an initial, high volume screen for agents that inhibit a broad array of Type I interferon activities similar to the Type I interferon activity pattern of a subject synthetic Type I interferon receptor polypeptide agonist. In this way, candidate agents likely to inhibit a broad spectrum of Type I interferon activities (similar to the activity profile of a subject synthetic Type I interferon receptor polypeptide agonist) can be obtained with ease, avoiding prohibitively expensive and logistically impossible numbers of viral growth inhibition assays or cell proliferation inhibition assays on large chemical libraries.

[0756] In one embodiment, the synthetic Type I interferon receptor polypeptide agonists of the invention are used to screen chemical libraries in a Kinase Receptor Activation (KIRA) Assay as described in WO 95/14930 (published 1 June 11025). The KIRA assay is suitable for use herein because ligand binding to the Type I interferon receptor complex in situ in on the surface of host cells expressing the receptor induces a rapid increase in the phosphorylation of tyrosine residues in the intracellular domains of both IFNAR1 and IFNAR2 components of the receptor as taught in Platanias and Colamonici, J. Biol. Chem., 269: 17761-17764 (11024). The level of tyrosine phosphorylation can be used as a measure of signal transduction. The effect of a library compound on the levels of tyrosine phosphorylation induced by a subject synthetic Type I interferon receptor polypeptide agonist in the KIRA assay is an indication of the compound's inhibitory activity against the broad array of Type I interferons mimicked by the subject synthetic Type I interferon receptor polypeptide agonist.

[0757] The KIRA assay suitable for use herein employs (a) a host cell that expresses the Type I interferon receptor (both IFNAR1 and IFNAR2 components of the receptor) and (b) the subject synthetic Type I interferon receptor polypeptide agonist, which defines the inhibitor profile of interest. Cells which naturally express the human Type I interferon receptor, such as the human Daudi cells and U-266 human myeloma cells described in Colamonici and Domanski, J. Biol. Chem. 268: 10895-108102 (11023), can be used. In addition, cells which are transfected with the IFNAR1 and IFNAR2 components and contain intracellular signaling proteins necessary for Type I interferon signal transduction, such as mouse L-929 cells as described in Domanski et al., J. Biol. Chem., 270: 21606-21611 (11025), can be used. In the KIRA assay, the candidate antagonist is incubated with the subject synthetic Type I interferon receptor polypeptide agonist to be tested, and the incubation mixture is contacted with the Type I interferon receptor-expressing host cells. The treated cells are lysed, and IFNAR2 protein in the cell lysate is immobilized by capture with solid phase anti-IFNAR2 antibody. Signal transduction is assayed by measuring the amount of tyrosine phosphorylation that exists in the intracellular domain (ICD) of captured IFNAR2 and the amount of tyrosine phosphorylation that exists in the intracellular domain of any co-captured IFNAR1. Alternatively, cell lysis and immunoprecipitation can be performed under denaturing conditions in order to avoid co-capture of IFNAR1 and permit measurement of IFNAR2 tyrosine phosphorylation alone, e.g. as described in Platanias et al., J. Biol. Chem., 271: 23630-23633 (11026). The level of tyrosine phosphorylation can be accurately measured with labeled anti-phosphotyrosine antibody, which identifies phosphorylated tyrosine residues.

[0758] In another embodiment, a host cell coexpressing IFNAR1 and a chimeric construct containing IFNAR2 fused at its carboxy terminus to an affinity handle polypeptide is used in the KIRA assay. The chimeric IFNAR2 construct permits capture of the construct from cell lysate by use of a solid phase capture agent (in place of an anti-IFNAR2 antibody) specific for the affinity handle polypeptide. In a preferred embodiment, the affinity handle polypeptide is Herpes simplex virus glycoprotein D (gD) and the capture agent is an anti-gD monoclonal antibody as described in Examples 2 and 3 of WO 95/14930.

[0759] In this system, the synthetic Type I interferon receptor polypeptide agonist of the invention that possesses the Type I interferon activity profile of interest is used as a standard for analysis of the tyrosine phosphorylation inhibition patterns generated by the members of the chemical library that is screened. The IFNAR2 ICD tyrosine phosphorylation pattern generated by the synthetic Type I interferon receptor polypeptide agonist standard is compared to the tyrosine phosphorylation patterns produced by the standard in the presence of library compounds, and patterns found to indicate inhibition of tyrosine phosphorylation identify candidate agents that are likely to inhibit a range of type I interferon activities similar to the spectrum of Type I interferon activities mimicked by the standard. Accordingly, the synthetic Type I interferon receptor polypeptide agonist of the invention provides a useful means to quickly and efficiently screen large chemical libraries for compounds likely to inhibit the particular spectrum of Type I interferon activities exhibited by the subject synthetic Type I interferon receptor polypeptide agonist.

[0760] In addition, the synthetic Type I interferon receptor polypeptide agonist of the invention are useful in diagnostic assays for Type I interferon receptor expression in specific cells or tissues. In these assays, the subject synthetic Type I interferon receptor polypeptide agonists are labeled as described below and/or immobilized on an insoluble matrix, which allows for the detection of Type I interferon receptor in a sample.

[0761] The subject synthetic Type I interferon receptor polypeptide agonists can be used for the detection of Type I interferon receptor in any one of a number of well known diagnostic assay methods. For example, a biological sample may be assayed for Type I interferon receptor by obtaining the sample from a desired source, admixing the sample with a subject synthetic Type I interferon receptor polypeptide agonist to allow the subject synthetic Type I interferon receptor polypeptide agonist to form agonist/Type I interferon receptor complex with any Type I interferon receptor present in the mixture, and detecting any agonist/Type I interferon receptor complex present in the mixture. The biological sample may be prepared for assay by methods known in the art that are suitable for the particular sample. The methods of admixing the sample with the subject synthetic Type I interferon receptor polypeptide agonist and the methods of detecting agonist/Type I interferon receptor complex are chosen according to the type of assay used. Such assays include competitive and sandwich assays, and steric inhibition assays. Competitive and sandwich methods employ a phase-separation step as an integral part of the method while steric inhibition assays are conducted in a single reaction mixture.

[0762] Analytical methods for Type I interferon receptor all use one or more of the following reagents: labeled Type I interferon receptor analogue, immobilized Type I interferon receptor analogue, labeled synthetic Type I interferon receptor polypeptide agonist, immobilized synthetic Type I interferon receptor polypeptide agonist and steric conjugates. The labeled reagents also are known as “tracers.”

[0763] The label used is any detectable functionality that does not interfere with the binding of Type I interferon receptor and the subject synthetic Type I interferon receptor polypeptide agonist. Numerous labels are known for use in immunoassay, examples including moieties that may be detected directly, such as fluorochrome, chemiluminescent, and radioactive labels, as well as moieties, such as enzymes, that must be reacted or derivatized to be detected. Examples of such labels include the radioisotopes ³²P, ¹⁴C, ¹²⁵I, ³H, and ¹³¹I, fluorophores such as rare earth chelates or fluorescein and its derivatives, rhodamine and its derivatives, dansyl, umbelliferone, luceriferases, e.g., firefly luciferase and bacterial luciferase (U.S. Pat. No. 4,737,456), luciferin, 2,3-dihydrophthalazinediones, horseradish peroxidase (HRP), alkaline phosphatase, β-galactosidase, glucoamylase, lysozyme, saccharide oxidases, e.g., glucose oxidase, galactose oxidase, and glucose-6-phosphate dehydrogenase, heterocyclic oxidases such as uricase and xanthine oxidase, coupled with an enzyme that employs hydrogen peroxide to oxidize a dye precursor such as HRP, lactoperoxidase, or microperoxidase, biotin/avidin, spin labels, bacteriophage labels, stable free radicals, and the like.

[0764] Conventional methods are available to bind these labels covalently to proteins or polypeptides. For instance, coupling agents such as dialdehydes, carbodiimides, dimaleimides, bis-imidates, bis-diazotized benzidine, and the like may be used to tag the antibodies with the above-described fluorescent, chemiluminescent, and enzyme labels. See, for example, U.S. Pat. No. 3,940,475 (fluorimetry) and U.S. Pat. No. 3,645,090 (enzymes); Hunter et al., Nature, 144: 945 (1962); David eta al., Biochemistry, 13: 1014-1021 (1974); Pain et al., J. Immunol. Methods, 40: 219-230 (1981); and Nygren, J. Histochem. and Cytochem., 30: 407-412 (1982). Preferred labels herein are enzymes such as horseradish peroxidase and alkaline phosphatase.

[0765] The conjugation of such label, including the enzymes, to the antibody is a standard manipulative procedure for one of ordinary skill in immunoassay techniques. See, for example, O'Sullivan et al., “Methods for the Preparation of Enzyme-antibody Conjugates for Use in Enzyme Immunoassay,” in Methods in Enzymology, ed. J. J. Langone and H. Van Vunakis, Vol. 73 (Academic Press, New York, N.Y., 1981), pp. 147-166.

[0766] Immobilization of reagents is required for certain assay methods. Immobilization entails separating the synthetic Type I interferon receptor polypeptide agonist from any Type I interferon receptor that remains free in solution. This conventionally is accomplished by either insolubilizing the synthetic Type I interferon receptor polypeptide agonist or Type I interferon receptor analogue before the assay procedure, as by adsorption to a water-insoluble matrix or surface (Bennich et al., U.S. Pat. No. 3,720,760), by covalent coupling (for example, using glutaraldehyde cross-linking), or by insolubilizing the synthetic Type I interferon receptor polypeptide agonist or Type I interferon receptor analogue afterward, e.g., by immunoprecipitation.

[0767] Other assay methods, known as competitive or sandwich assays, are well established and widely used in the commercial diagnostics industry.

[0768] Competitive assays rely on the ability of a tracer Type I interferon receptor analogue to compete with the test sample Type I interferon receptor for a limited number of synthetic Type I interferon receptor polypeptide agonist binding sites. The synthetic Type I interferon receptor polypeptide agonist generally is insolubilized before or after the competition and then the tracer and Type I interferon receptor bound to the synthetic Type I interferon receptor polypeptide agonist are separated from the unbound tracer and Type I interferon receptor. This separation is accomplished by decanting (where the binding partner was preinsolubilized) or by centrifuging (where the binding partner was precipitated after the competitive reaction). The amount of test sample Type I interferon receptor is inversely proportional to the amount of bound tracer as measured by the amount of marker substance. Dose-response curves with known amounts of Type I interferon receptor are prepared and compared with the test results to quantitatively determine the amount of Type I interferon receptor present in the test sample. These assays are called ELISA systems when enzymes are used as the detectable markers.

[0769] Another species of competitive assay, called a “homogeneous” assay, does not require a phase separation. Here, a conjugate of an enzyme with the Type I interferon receptor is prepared and used such that when synthetic Type I interferon receptor polypeptide agonist binds to the Type I interferon receptor the presence of the synthetic Type I interferon receptor polypeptide agonist modifies the enzyme activity. In this case, the Type I interferon receptor or its immunologically active fragments are conjugated with a bifunctional organic bridge to an enzyme such as peroxidase. Conjugates are selected for use with synthetic Type I interferon receptor polypeptide agonist so that binding of the synthetic Type I interferon receptor polypeptide agonist inhibits or potentiates the enzyme activity of the label. This method per se is widely practiced under the name of EMIT.

[0770] Steric conjugates are used in steric hindrance methods for homogeneous assay. These conjugates are synthesized by covalently linking a low-molecular-weight hapten to a small Type I interferon receptor fragment so that antibody to hapten is substantially unable to bind the conjugate at the same time as synthetic Type I interferon receptor polypeptide agonist. Under this assay procedure the Type I interferon receptor present in the test sample will bind synthetic Type I interferon receptor polypeptide agonist, thereby allowing anti-hapten to bind the conjugate, resulting in a change in the character of the conjugate hapten, e.g., a change in fluorescence when the hapten is a fluorophore.

[0771] Sandwich assays particularly are useful for the determination of Type I interferon receptor in a sample. In sequential sandwich assays an immobilized synthetic Type I interferon receptor polypeptide agonist is used to adsorb test sample Type I interferon receptor, the test sample is removed as by washing, the bound Type I interferon receptor is used to adsorb a labeled anti-Type I interferon receptor antibody and bound material is then separated from residual tracer. The amount of bound tracer is directly proportional to test sample Type I interferon receptor. In “simultaneous” sandwich assays the test sample is not separated before adding the labeled anti-Type I interferon receptor antibody.

[0772] The foregoing are merely exemplary diagnostic assays for Type I interferon receptor. Other methods now or hereafter developed that use synthetic Type I interferon receptor polypeptide agonist for the determination of Type I interferon receptor are included within the scope hereof, including the bioassays described above.

Therapeutic Methods

[0773] The present invention provides method of treating fibrotic disorders. The subject methods generally involve administering to an individual in need thereof an effective combination of a subject synthetic Type I interferon receptor polypeptide agonist, a hyperglycosylated polypeptide variant, a protease-resistant polypeptide variant, or a hyperglycosylated, protease-resistant polypeptide variant and a Type II interferon receptor agonist. In some embodiments, a subject treatment method further includes administering at least one additional anti-fibrotic agent.

[0774] The present invention further provides methods of treating cancer. The subject methods generally involve administering to an individual in need thereof an effective amount of a subject synthetic Type I interferon receptor polypeptide agonist, a hyperglycosylated polypeptide variant, a protease-resistant polypeptide variant, or a hyperglycosylated, protease-resistant polypeptide variant. In some embodiments, a subject method further includes administering at least one additional anti-cancer agent.

[0775] The present invention additionally provides methods of treating viral infection. The subject methods generally involve administering to an individual in need thereof an effective amount of a subject synthetic Type I interferon receptor polypeptide agonist, a hyperglycosylated polypeptide variant, a protease-resistant polypeptide variant, or a hyperglycosylated, protease-resistant polypeptide variant. In some embodiments, a subject method further includes administering at least one additional anti-viral agent.

[0776] In some embodiments, a subject treatment method further includes administering a side effect management agent, to treat a side effect induced by a therapeutic agent.

Fibrotic Disorders

[0777] The present invention provides methods for treating a fibrotic disorder in an individual having a fibrotic disorder. The method generally involves administering an effective combination of a subject synthetic Type I interferon receptor polypeptide agonist, a hyperglycosylated polypeptide variant, a protease-resistant polypeptide variant, or a hyperglycosylated, protease-resistant polypeptide variant and a Type II interferon receptor agonist. The methods provide for treatment of fibrotic diseases, including those affecting the lung such as idiopathic pulmonary fibrosis, pulmonary fibrosis from a known etiology, liver fibrosis or cirrhosis, cardiac fibrosis, and renal fibrosis. The etiology may be due to any acute or chronic insult including toxic, metabolic, genetic and infectious agents.

[0778] Fibrosis is generally characterized by the pathologic or excessive accumulation of collagenous connective tissue. Fibrotic disorders include, but are not limited to, collagen disease, interstitial lung disease, human fibrotic lung disease (e.g., obliterative bronchiolitis, idiopathic pulmonary fibrosis, pulmonary fibrosis from a known etiology, tumor stroma in lung disease, systemic sclerosis affecting the lungs, Hermansky-Pudlak syndrome, coal worker's pneumoconiosis, asbestosis, silicosis, chronic pulmonary hypertension, AIDS-associated pulmonary hypertension, sarcoidosis, and the like), fibrotic vascular disease, arterial sclerosis, atherosclerosis, varicose veins, coronary infarcts, cerebral infarcts, myocardial fibrosis, musculoskeletal fibrosis, post-surgical adhesions, human kidney disease (e.g., nephritic syndrome, Alport's syndrome, HIV-associated nephropathy, polycystic kidney disease, Fabry's disease, diabetic nephropathy, chronic glomerulonephritis, nephritis associated with systemic lupus, and the like), cutis keloid formation, progressive systemic sclerosis (PSS), primary sclerosing cholangitis (PSC), liver fibrosis, liver cirrhosis, renal fibrosis, pulmonary fibrosis, cystic fibrosis, chronic graft versus host disease, scleroderma (local and systemic), Grave's opthalmopathy, diabetic retinopathy, glaucoma, Peyronie's disease, penis fibrosis, urethrostenosis after the test using a cystoscope, inner accretion after surgery, scarring, myelofibrosis, idiopathic retroperitoneal fibrosis, peritoneal fibrosis from a known etiology, drug-induced ergotism, fibrosis incident to benign or malignant cancer, fibrosis incident to microbial infection (e.g., viral, bacterial, parasitic, fungal, etc.), Alzheimer's disease, fibrosis incident to inflammatory bowel disease (including stricture formation in Crohn's disease and microscopic colitis), fibrosis induced by chemical or environmental insult (e.g., cancer chemotherapy, pesticides, radiation (e.g., cancer radiotherapy), and the like), and the like.

[0779] In some embodiments, effective amounts of a synthetic Type I interferon receptor polypeptide agonist and a Type II interferon receptor agonist are any combined dosage that, when administered to an individual having a fibrotic disorder, is effective to reduce fibrosis or reduce the rate of progression of fibrosis by at least about 10%, at least about 15%, at least about 20%, at least about 25%, at least about 30%, at least about 35%, at least about 40%, at least about 45%, or at least about 50%, or more, compared with the degree of fibrosis in the individual prior to treatment or compared to the rate of progression of fibrosis that would have been experienced by the patient in the absence of treatment.

[0780] In some embodiments, effective amounts of a subject synthetic Type I interferon receptor polypeptide agonist, a hyperglycosylated polypeptide variant, a protease-resistant polypeptide variant, or a hyperglycosylated, protease-resistant polypeptide variant and a Type II interferon receptor agonist are any combined dosage that, when administered to an individual having a fibrotic disorder, is effective to increase, or to reduce the rate of deterioration of, at least one function of the organ affected by fibrosis (e.g., lung, liver, kidney, etc.) by at least about 10%, at least about 15%, at least about 20%, at least about 25%, at least about 30%, at least about 35%, at least about 40%, at least about 45%, or at least about 50%, or more, compared to the baseline level of organ function in the individual prior to treatment or compared to the rate of deterioration in organ function that would have been experienced by the individual in the absence of treatment.

[0781] Methods of measuring the extent of fibrosis in a given organ, and methods of measuring the function of any given organ, are well known in the art.

Idiopathic Pulmonary Fibrosis

[0782] The present invention provides methods of treating idiopathic pulmonary fibrosis (IPF). The methods generally involve administering to an individual having IPF effective amounts of a subject synthetic Type I interferon receptor polypeptide agonist, a hyperglycosylated polypeptide variant, a protease-resistant polypeptide variant, or a hyperglycosylated, protease-resistant polypeptide variant and a Type II interferon receptor agonist.

[0783] In some embodiments, a diagnosis of IPF is confirmed by the finding of usual interstitial pneumonia (UIP) on histopathological evaluation of lung tissue obtained by surgical biopsy. The criteria for a diagnosis of IPF are known. Ryu et al. (11028) Mayo Clin. Proc. 73:1085-1101.

[0784] In other embodiments, a diagnosis of IPF is a definite or probable IPF made by high resolution computer tomography (HRCT). In a diagnosis by HRCT, the presence of the following characteristics is noted: (1) presence of reticular abnormality and/or traction bronchiectasis with basal and peripheral predominance; (2) presence of honeycombing with basal and peripheral predominance; and (3) absence of atypical features such as micronodules, peribronchovascular nodules, consolidation, isolated (non-honeycomb) cysts, ground glass attenuation (or, if present, is less extensive than reticular opacity), and mediastinal adenopathy (or, if present, is not extensive enough to be visible on chest x-ray). A diagnosis of definite IPF is made if characteristics (1), (2), and (3) are met. A diagnosis of probable IPF is made if characteristics (1) and (3) are met.

[0785] In some embodiments, “effective amounts” of a subject synthetic Type I interferon receptor polypeptide agonist, a hyperglycosylated polypeptide variant, a protease-resistant polypeptide variant, or a hyperglycosylated, protease-resistant polypeptide variant and a Type II interferon receptor agonist are a combined dosage that is effective to decrease disease progression by at least about 10%, at least about 15%, at least about 20%, at least about 25%, at least about 30%, at least about 35%, at least about 40%, at least about 45%, at least about 50%, at least about 55%, at least about 60%, at least about 65%, at least about 70%, or more, compared with a placebo control or an untreated control.

[0786] Disease progression is the occurrence of one or more of the following: (1) a decrease in predicted FVC of 10% or more; (2) an increase in A-a gradient of 5 mm Hg or more; (3) a decrease of 15% of more in single breath DL_{co}. Whether disease progression has occurred is determined by measuring one or more of these parameters on two consecutive occasions 4 to 14 weeks apart, and comparing the value to baseline.

[0787] Thus, e.g., where an untreated or placebo-treated individual exhibits a 50% decrease in FVC over a period of time, an individual administered with an effective combination of a synthetic Type I interferon receptor polypeptide agonist and a Type II interferon receptor agonist exhibits a decrease in FVC of 45%, about 42%, about 40%, about 37%, about 35%, about 32%, about 30%, or less, over the same time period.

[0788] In some embodiments, “effective amounts” of a subject synthetic Type I interferon receptor polypeptide agonist, a hyperglycosylated polypeptide variant, a protease-resistant polypeptide variant, or a hyperglycosylated, protease-resistant polypeptide variant and a Type II interferon receptor agonist are any combined dosage that is effective to increase progression-free survival time, e.g., the time from baseline (e.g., a time point from 1 day to 28 days before beginning of treatment) to death or disease progression is increased by at least about 10%, at least about 20%, at least about 25%, at least about 30%, at least about 40%, at least about 50%, at least about 60%, at least about 70%, at least about 80%, at least about 90%, at least about 2-fold, at least about 3-fold, at least about 4-fold, at least about 5-fold, or more, compared a placebo-treated or an untreated control individual. Thus, e.g., in some embodiments effective amounts of a subject synthetic Type I interferon receptor polypeptide agonist, a hyperglycosylated polypeptide variant, a protease-resistant polypeptide variant, or a hyperglycosylated, protease-resistant polypeptide variant and a Type II interferon receptor agonist are any combined dosage that is effective to increase the progression-free survival time by at least about 1 week, at least about 2 weeks, at least about 3 weeks, at least about 4 weeks, at least about 2 months, at least about 3 months, at least about 4 months, at least about 5 months, at least about 6 months, at least about 8 months, at least about 10 months, at least about 12 months, at least about 18 months, at least about 2 years, at least about 3 years, or longer, compared to a placebo-treated or untreated control.

[0789] In some embodiments, effective amounts of a subject synthetic Type I interferon receptor polypeptide agonist, a hyperglycosylated polypeptide variant, a protease-resistant polypeptide variant, or a hyperglycosylated, protease-resistant polypeptide variant and a Type II interferon receptor agonist are any combined dosage that is effective to increase at least one parameter of lung function, e.g., a combined dosage that increases at least one parameter of lung function by at least about 10%, at least about 20%, at least about 25%, at least about 30%, at least about 40%, at least about 50%, at least about 60%, at least about 70%, at least about 80%, at least about 90%, at least about 2-fold, at least about 3-fold, at least about 4-fold, at least about 5-fold, or more, compared to an untreated individual or a placebo-treated control individual. In some of these embodiments, a determination of whether a parameter of lung function is increased is made by comparing the baseline value with the value at any time point after the beginning of treatment, e.g., 48 weeks after the beginning of treatment, or between two time points, e.g., about 4 to about 14 weeks apart, after the beginning of treatment.

[0790] In some embodiments, effective amounts of a subject synthetic Type I interferon receptor polypeptide agonist, a hyperglycosylated polypeptide variant, a protease-resistant polypeptide variant, or a hyperglycosylated, protease-resistant polypeptide variant and a Type II interferon receptor agonist are any combined dosage that is effective to increase the FVC by at least about 10% at least about 20%, at least about 25%, at least about 30%, at least about 40%, at least about 50%, at least about 60%, at least about 70%, at least about 80%, at least about 90%, at least about 2-fold, at least about 3-fold, at least about 4-fold, at least about 5-fold, or more compared to baseline on two consecutive occasions 4 to 14 weeks apart.

[0791] In some embodiments, effective amounts of a subject synthetic Type I interferon receptor polypeptide agonist, a hyperglycosylated polypeptide variant, a protease-resistant polypeptide variant, or a hyperglycosylated, protease-resistant polypeptide variant and a Type II interferon receptor agonist are any combined dosage that results in a decrease in alveolar:arterial (A-a) gradient of at least about 5 mm Hg, at least about 7 mm Hg, at least about 10 mm Hg, at least about 12 mm Hg, at least about 15 mm Hg, or more, compared to baseline.

[0792] In some embodiments, effective amounts of a subject synthetic Type I interferon receptor polypeptide agonist, a hyperglycosylated polypeptide variant, a protease-resistant polypeptide variant, or a hyperglycosylated, protease-resistant polypeptide variant and a Type II interferon receptor agonist are any combined dosage that increases the single breath DL_{co} by at least about 15%, at least about 20%, at least about 30%, at least about 40%, at least about 50%, at least about 60%, at least about 70%, at least about 80%, at least about 90%, at least about 2-fold, at least about 3-fold, at least about 4-fold, at least about 5-fold, or more, compared to baseline. CL_{co} is the lung diffusing capacity for carbon monoxide, and is expressed as mL CO/mm Hg/second.

[0793] Parameters of lung function include, but are not limited to, forced vital capacity (FVC); forced expiratory volume (FEV₁); total lung capacity; partial pressure of arterial oxygen at rest; partial pressure of arterial oxygen at maximal exertion.

[0794] Lung function can be measured using any known method, including, but not limited to spirometry.

Liver Fibrosis

[0795] The present invention provides methods of treating liver fibrosis, including reducing clinical liver fibrosis, reducing the likelihood that liver fibrosis will occur, and reducing a parameter associated with liver fibrosis. The methods generally involve administering a combination of an effective amount of a subject synthetic Type I interferon receptor polypeptide agonist, a hyperglycosylated polypeptide variant, a protease-resistant polypeptide variant, or a hyperglycosylated, protease-resistant polypeptide variant and an effective amount of a Type II interferon receptor agonist to an individual in need thereof. Of particular interest in many embodiments is treatment of humans.

[0796] Liver fibrosis is a precursor to the complications associated with liver cirrhosis, such as portal hypertension, progressive liver insufficiency, and hepatocellular carcinoma. A reduction in liver fibrosis thus reduces the incidence of such complications. Accordingly, the present invention further provides methods of reducing the likelihood that an individual will develop complications associated with cirrhosis of the liver.

[0797] The present methods generally involve administering therapeutically effective amounts of a subject synthetic Type I interferon receptor polypeptide agonist, a hyperglycosylated polypeptide variant, a protease-resistant polypeptide variant, or a hyperglycosylated, protease-resistant polypeptide variant and a Type II interferon receptor agonist. As used herein, “effective amounts” of a subject synthetic Type I interferon receptor polypeptide agonist, a hyperglycosylated polypeptide variant, a protease-resistant polypeptide variant, or a hyperglycosylated, protease-resistant polypeptide variant and a Type II interferon receptor agonist are any combined dosage that is effective in reducing liver fibrosis or reducing the rate of progression of liver fibrosis; and/or that is effective in reducing the likelihood that an individual will develop liver fibrosis; and/or that is effective in reducing a parameter associated with liver fibrosis; and/or that is effective in reducing a disorder associated with cirrhosis of the liver.

[0798] The invention also provides a method for treatment of liver fibrosis in an individual comprising administering to the individual an amount of a subject synthetic Type I interferon receptor polypeptide agonist, a hyperglycosylated polypeptide variant, a protease-resistant polypeptide variant, or a hyperglycosylated, protease-resistant polypeptide variant and an amount of Type II interferon receptor agonist that in combination are effective for prophylaxis or therapy of liver fibrosis in the individual, e.g., increasing the probability of survival, reducing the risk of death, ameliorating the disease burden or slowing the progression of disease in the individual.

[0799] Whether treatment with a combination of a subject synthetic Type I interferon receptor polypeptide agonist, a hyperglycosylated polypeptide variant, a protease-resistant polypeptide variant, or a hyperglycosylated, protease-resistant polypeptide variant and a Type II interferon receptor agonist is effective in reducing liver fibrosis is determined by any of a number of well-established techniques for measuring liver fibrosis and liver function. Whether liver fibrosis is reduced is determined by analyzing a liver biopsy sample. An analysis of a liver biopsy comprises assessments of two major components: necroinflammation assessed by “grade” as a measure of the severity and ongoing disease activity, and the lesions of fibrosis and parenchymal or vascular remodeling as assessed by “stage” as being reflective of long-term disease progression. See, e.g., Brunt (2000) Hepatol. 31:241-246; and METAVIR (11024) Hepatology 20:15-20. Based on analysis of the liver biopsy, a score is assigned. A number of standardized scoring systems exist which provide a quantitative assessment of the degree and severity of fibrosis. These include the METAVIR, Knodell, Scheuer, Ludwig, and Ishak scoring systems.

[0800] The METAVIR scoring system is based on an analysis of various features of a liver biopsy, including fibrosis (portal fibrosis, centrilobular fibrosis, and cirrhosis); necrosis (piecemeal and lobular necrosis, acidophilic retraction, and ballooning degeneration); inflammation (portal tract inflammation, portal lymphoid aggregates, and distribution of portal inflammation); bile duct changes; and the Knodell index (scores of periportal necrosis, lobular necrosis, portal inflammation, fibrosis, and overall disease activity). The definitions of each stage in the METAVIR system are as follows: score: 0, no fibrosis; score: 1, stellate enlargement of portal tract but without septa formation; score: 2, enlargement of portal tract with rare septa formation; score: 3, numerous septa without cirrhosis; and score: 4, cirrhosis.

[0801] Knodell's scoring system, also called the Hepatitis Activity Index, classifies specimens based on scores in four categories of histologic features: I. Periportal and/or bridging necrosis; II. Intralobular degeneration and focal necrosis; III. Portal inflammation; and IV. Fibrosis. In the Knodell staging system, scores are as follows: score: 0, no fibrosis; score: 1, mild fibrosis (fibrous portal expansion); score: 2, moderate fibrosis; score: 3, severe fibrosis (bridging fibrosis); and score: 4, cirrhosis. The higher the score, the more severe the liver tissue damage. Knodell (1981) Hepatol. 1:431.

[0802] In the Scheuer scoring system scores are as follows: score: 0, no fibrosis; score: 1, enlarged, fibrotic portal tracts; score: 2, periportal or portal-portal septa, but intact architecture; score: 3, fibrosis with architectural distortion, but no obvious cirrhosis; score: 4, probable or definite cirrhosis. Scheuer (11021) J Hepatol. 13:372.

[0803] The Ishak scoring system is described in Ishak (11025) J. Hepatol. 22:696-6102. Stage 0, No fibrosis; Stage 1, Fibrous expansion of some portal areas, with or without short fibrous septa; stage 2, Fibrous expansion of most portal areas, with or without short fibrous septa; stage 3, Fibrous expansion of most portal areas with occasional portal to portal (P—P) bridging; stage 4, Fibrous expansion of portal areas with marked bridging (P—P) as well as portal-central (P—C); stage 5, Marked bridging (P—P and/or P—C) with occasional nodules (incomplete cirrhosis); stage 6, Cirrhosis, probable or definite. The benefit of anti-fibrotic therapy can also be measured and assessed by using the Child-Pugh scoring system which comprises a multicomponent point system based upon abnormalities in serum bilirubin level, serum albumin level, prothrombin time, the presence and severity of ascites, and the presence and severity of encephalopathy. Based upon the presence and severity of abnormality of these parameters, patients may be placed in one of three categories of increasing severity of clinical disease: A, B, or C.

[0804] In some embodiments, a therapeutically effective combination of a subject synthetic Type I interferon receptor polypeptide agonist, a hyperglycosylated polypeptide variant, a protease-resistant polypeptide variant, or a hyperglycosylated, protease-resistant polypeptide variant and a Type II interferon receptor agonist is any combined dosage that effects a change of one unit or more in the fibrosis stage based on pre- and post-therapy liver biopsies. In particular embodiments, a therapeutically effective combined dosage reduces liver fibrosis by at least one unit in the METAVIR, the Knodell, the Scheuer, the Ludwig, or the Ishak scoring system.

[0805] Secondary, or indirect, indices of liver function can also be used to evaluate the efficacy of treatment with a subject synthetic Type I interferon receptor polypeptide agonist, a hyperglycosylated polypeptide variant, a protease-resistant polypeptide variant, or a hyperglycosylated, protease-resistant polypeptide variant and Type II interferon receptor agonist. Morphometric computerized semi-automated assessment of the quantitative degree of liver fibrosis based upon specific staining of collagen and/or serum markers of liver fibrosis can also be measured as an indication of the efficacy of a subject treatment method. Secondary indices of liver function include, but are not limited to, serum transaminase levels, prothrombin time, bilirubin, platelet count, portal pressure, albumin level, and assessment of the Child-Pugh score.

[0806] In another embodiment, an effective combination of a subject synthetic Type I interferon receptor polypeptide agonist, a hyperglycosylated polypeptide variant, a protease-resistant polypeptide variant, or a hyperglycosylated, protease-resistant polypeptide variant and a Type II interferon receptor agonist is any combined dosage that is effective to increase an index of liver function by at least about 10%, at least about 20%, at least about 25%, at least about 30%, at least about 35%, at least about 40%, at least about 45%, at least about 50%, at least about 55%, at least about 60%, at least about 65%, at least about 70%, at least about 75%, or at least about 80%, or more, compared to the index of liver function in an untreated individual, or in a placebo-treated individual. Those skilled in the art can readily measure such indices of liver function, using standard assay methods, many of which are commercially available, and are used routinely in clinical settings.

[0807] Serum markers of liver fibrosis can also be measured as an indication of the efficacy of a subject treatment method. Serum markers of liver fibrosis include, but are not limited to, hyaluronate, N-terminal procollagen III peptide, 7S domain of type IV collagen, C-terminal procollagen I peptide, and laminin. Additional biochemical markers of liver fibrosis include α-2-macroglobulin, haptoglobin, gamma globulin, apolipoprotein A, and gamma glutamyl transpeptidase.

[0808] In another embodiment, a therapeutically effective combination of a subject synthetic Type I interferon receptor polypeptide agonist, a hyperglycosylated polypeptide variant, a protease-resistant polypeptide variant, or a hyperglycosylated, protease-resistant polypeptide variant and a Type II interferon receptor agonist is any combined dosage that is effective to reduce a serum level of a marker of liver fibrosis by at least about 10%, at least about 20%, at least about 25%, at least about 30%, at least about 35%, at least about 40%, at least about 45%, at least about 50%, at least about 55%, at least about 60%, at least about 65%, at least about 70%, at least about 75%, or at least about 80%, or more, compared to the level of the marker in an untreated individual, or in a placebo-treated individual. Those skilled in the art can readily measure such serum markers of liver fibrosis, using standard assay methods, many of which are commercially available, and are used routinely in clinical settings. Methods of measuring serum markers include immunological-based methods, e.g., enzyme-linked immunosorbent assays (ELISA), radioimmunoassays, and the like, using antibody specific for a given serum marker.

[0809] Quantitative tests of functional liver reserve can also be used to assess the efficacy of treatment with a subject synthetic Type I interferon receptor polypeptide agonist, a hyperglycosylated polypeptide variant, a protease-resistant polypeptide variant, or a hyperglycosylated, protease-resistant polypeptide variant and a Type II interferon receptor agonist. These include: indocyanine green clearance (ICG), galactose elimination capacity (GEC), aminopyrine breath test (ABT), antipyrine clearance, monoethylglycine-xylidide (MEG-X) clearance, and caffeine clearance.

[0810] As used herein, a “complication associated with cirrhosis of the liver” refers to a disorder that is a sequellae of decompensated liver disease, i.e., or occurs subsequently to and as a result of development of liver fibrosis, and includes, but it not limited to, development of ascites, variceal bleeding, portal hypertension, jaundice, progressive liver insufficiency, encephalopathy, hepatocellular carcinoma, liver failure requiring liver transplantation, and liver-related mortality.

[0811] In another embodiment, a therapeutically effective combination of a subject synthetic Type I interferon receptor polypeptide agonist, a hyperglycosylated polypeptide variant, a protease-resistant polypeptide variant, or a hyperglycosylated, protease-resistant polypeptide variant and a Type II interferon receptor agonist is any combined dosage that is effective in reducing the incidence of (e.g., the likelihood that an individual will develop) a disorder associated with cirrhosis of the liver by at least about 10%, at least about 20%, at least about 25%, at least about 30%, at least about 35%, at least about 40%, at least about 45%, at least about 50%, at least about 55%, at least about 60%, at least about 65%, at least about 70%, at least about 75%, or at least about 80%, or more, compared to an untreated individual, or in a placebo-treated individual.

[0812] Whether combination therapy with a subject synthetic Type I interferon receptor polypeptide agonist, a hyperglycosylated polypeptide variant, a protease-resistant polypeptide variant, or a hyperglycosylated, protease-resistant polypeptide variant and a Type II interferon receptor agonist is effective in reducing the incidence of a disorder associated with cirrhosis of the liver can readily be determined by those skilled in the art.

[0813] Reduction in liver fibrosis increases liver function. Thus, the invention provides methods for increasing liver function, generally involving administering a therapeutically effective combined dosage of a subject synthetic Type I interferon receptor polypeptide agonist, a hyperglycosylated polypeptide variant, a protease-resistant polypeptide variant, or a hyperglycosylated, protease-resistant polypeptide variant and a Type II interferon receptor agonist. Liver functions include, but are not limited to, synthesis of proteins such as serum proteins (e.g., albumin, clotting factors, alkaline phosphatase, aminotransferases (e.g., alanine transaminase, aspartate transaminase), 5′-nucleosidase, γ-glutaminyltranspeptidase, etc.), synthesis of bilirubin, synthesis of cholesterol, and synthesis of bile acids; a liver metabolic function, including, but not limited to, carbohydrate metabolism, amino acid and ammonia metabolism, hormone metabolism, and lipid metabolism; detoxification of exogenous drugs; a hemodynamic function, including splanchnic and portal hemodynamics; and the like.

[0814] Whether a liver function is increased is readily ascertainable by those skilled in the art, using well-established tests of liver function. Thus, synthesis of markers of liver function such as albumin, alkaline phosphatase, alanine transaminase, aspartate transaminase, bilirubin, and the like, can be assessed by measuring the level of these markers in the serum, using standard immunological and enzymatic assays. Splanchnic circulation and portal hemodynamics can be measured by portal wedge pressure and/or resistance using standard methods. Metabolic functions can be measured by measuring the level of ammonia in the serum.

[0815] Whether serum proteins normally secreted by the liver are in the normal range can be determined by measuring the levels of such proteins, using standard immunological and enzymatic assays. Those skilled in the art know the normal ranges for such serum proteins. The following are non-limiting examples. The normal range of alanine transaminase is from about 7 to about 56 units per liter of serum. The normal range of aspartate transaminase is from about 5 to about 40 units per liter of serum. Bilirubin is measured using standard assays. Normal bilirubin levels are usually less than about 1.2 mg/dL. Serum albumin levels are measured using standard assays. Normal levels of serum albumin are in the range of from about 35 to about 55 g/L. Prolongation of prothrombin time is measured using standard assays. Normal prothrombin time is less than about 4 seconds longer than control.

[0816] In another embodiment, a therapeutically effective combination of a subject synthetic Type I interferon receptor polypeptide agonist, a hyperglycosylated polypeptide variant, a protease-resistant polypeptide variant, or a hyperglycosylated, protease-resistant polypeptide variant and a Type II interferon receptor agonist is any combined dosage that is effective to increase liver function by at least about 10%, at least about 20%, at least about 30%, at least about 40%, at least about 50%, at least about 60%, at least about 70%, at least about 80%, or more. For example, a therapeutically effective combination of a subject synthetic Type I interferon receptor polypeptide agonist, a hyperglycosylated polypeptide variant, a protease-resistant polypeptide variant, or a hyperglycosylated, protease-resistant polypeptide variant and a Type II interferon receptor agonist includes any combined dosage that is effective to reduce an elevated level of a serum marker of liver function by at least about 10%, at least about 20%, at least about 30%, at least about 40%, at least about 50%, at least about 60%, at least about 70%, at least about 80%, or more, or to reduce the level of the serum marker of liver function to within a normal range. A therapeutically effective combination of a subject synthetic Type I interferon receptor polypeptide agonist, a hyperglycosylated polypeptide variant, a protease-resistant polypeptide variant, or a hyperglycosylated, protease-resistant polypeptide variant and a Type II interferon receptor agonist also includes any combined dosage effective to increase a reduced level of a serum marker of liver function by at least about 10%, at least about 20%, at least about 30%, at least about 40%, at least about 50%, at least about 60%, at least about 70%, at least about 80%, or more, or to increase the level of the serum marker of liver function to within a normal range.

Renal Fibrosis

[0817] The present invention provides methods of treating renal fibrosis. The methods generally involve administering to an individual having renal fibrosis effective amounts of a subject synthetic Type I interferon receptor polypeptide agonist, a hyperglycosylated polypeptide variant, a protease-resistant polypeptide variant, or a hyperglycosylated, protease-resistant polypeptide variant and a Type II interferon receptor agonist. As used herein, “effective amounts” of a subject synthetic Type I interferon receptor polypeptide agonist, a hyperglycosylated polypeptide variant, a protease-resistant polypeptide variant, or a hyperglycosylated, protease-resistant polypeptide variant and a Type II interferon receptor agonist are any combined dosage that is effective in reducing renal fibrosis; and/or that is effective in reducing the likelihood that an individual will develop renal fibrosis; and/or that is effective in reducing a parameter associated with renal fibrosis; and/or that is effective in reducing a disorder associated with fibrosis of the kidney.

[0818] In one embodiment, effective amounts of a subject synthetic Type I interferon receptor polypeptide agonist, a hyperglycosylated polypeptide variant, a protease-resistant polypeptide variant, or a hyperglycosylated, protease-resistant polypeptide variant and a Type II interferon receptor agonist are any combined dosage that is sufficient to reduce renal fibrosis, or reduce the rate of progression of renal fibrosis, by at least about 10%, at least about 15%, at least about 20%, at least about 25%, at least about 30%, at least about 35%, at least about 40%, at least about 45%, at least about 50%, compared to the degree of renal fibrosis in the individual prior to treatment, or compared to the rate of progression of renal fibrosis that would have been experienced by the patient in the absence of treatment.

[0819] Whether fibrosis is reduced in the kidney is determined using any known method. For example, histochemical analysis of kidney biopsy samples for the extent of ECM deposition and/or fibrosis is performed. Other methods are known in the art. See, e.g., Masseroli et al. (11028) Lab. Invest. 78:511-522; U.S. Pat. No. 6,214,542.

[0820] In some embodiments, effective amounts of a subject synthetic Type I interferon receptor polypeptide agonist, a hyperglycosylated polypeptide variant, a protease-resistant polypeptide variant, or a hyperglycosylated, protease-resistant polypeptide variant and a Type II interferon receptor agonist are any combined dosage that is effective to increase kidney function by at least about 10%, at least about 15%, at least about 20%, at least about 25%, at least about 30%, at least about 35%, at least about 40%, at least about 45%, at least about 50%, compared to the baseline level of kidney function in the individual prior to treatment.

[0821] In some embodiments, effective amounts of a subject synthetic Type I interferon receptor polypeptide agonist, a hyperglycosylated polypeptide variant, a protease-resistant polypeptide variant, or a hyperglycosylated, protease-resistant polypeptide variant and a Type II interferon receptor agonist are any combined dosage that is effective to slow the decline in kidney function by at least about 10%, at least about 15%, at least about 20%, at least about 25%, at least about 30%, at least about 35%, at least about 40%, at least about 45%, at least about 50%, compared to the decline in kidney function that would occur in the absence of treatment.

[0822] Kidney function can be measured using any known assay, including, but not limited to, plasma creatinine level (where normal levels are generally in a range of from about 0.6 to about 1.2 mg/dL); creatinine clearance (where the normal range for creatinine clearance is from about 97 to about 137 mL/minute in men, and from about 88 to about 128 mL/minute in women); the glomerular filtration rate (either calculated or obtained from inulin clearance or other methods), blood urea nitrogen (where the normal range is from about 7 to about 20 mg/dL); and urine protein levels.

Additional Anti-Fibrotic Agents

[0823] Any of the above-described combination therapies for the treatment of a fibrotic disorder can be modified to include co-administration of one or more additional anti-fibrotic agents. Accordingly, the present invention provides a method of treating a fibrotic disorder, generally involving administering a subject synthetic Type I interferon receptor polypeptide agonist, a hyperglycosylated polypeptide variant, a protease-resistant polypeptide variant, or a hyperglycosylated, protease-resistant polypeptide variant and a Type II interferon receptor agonist in combination therapy with at least one additional anti-fibrotic agent. Suitable additional anti-fibrotic agents include, but are not limited to, SAPK inhibitors (e.g., pirfenidone or pirfenidone analogs), TNF antagonists, TGF-β antagonists, endothelin receptor antagonists, and the like.

[0824] As non-limiting examples, any of the above-described treatment methods featuring therapy with a combined dosage of a subject synthetic Type I interferon receptor polypeptide agonist, a hyperglycosylated polypeptide variant, a protease-resistant polypeptide variant, or a hyperglycosylated, protease-resistant polypeptide variant and a Type II interferon receptor agonist effective for the treatment of a fibrotic disorder in a patient can be modified to include co-administration to the patient of an amount of a SAPK inhibitor (e.g., pirfenidone or a pirfenidone analog) effective to augment the anti-fibrotic effect of the synthetic Type I interferon receptor polypeptide agonist and Type II interferon receptor agonist combination therapy, for the desired treatment duration.

[0825] As non-limiting examples, any of the above-described treatment methods featuring therapy with a combined dosage of a subject synthetic Type I interferon receptor polypeptide agonist, a hyperglycosylated polypeptide variant, a protease-resistant polypeptide variant, or a hyperglycosylated, protease-resistant polypeptide variant and a Type II interferon receptor agonist effective for the treatment of a fibrotic disorder in a patient can be modified to include co-administration to the patient of an amount of a TNF antagonist (e.g., etanercept, infliximab, or adalimumab) effective to augment the anti-fibrotic effect of the synthetic Type I interferon receptor polypeptide agonist and Type II interferon receptor agonist combination therapy, for the desired treatment duration.

[0826] As non-limiting examples, any of the above-described treatment methods featuring therapy with a combined dosage of a subject synthetic Type I interferon receptor polypeptide agonist, a hyperglycosylated polypeptide variant, a protease-resistant polypeptide variant, or a hyperglycosylated, protease-resistant polypeptide variant and a Type II interferon receptor agonist effective for the treatment of a fibrotic disorder in a patient can be modified to include co-administration to the patient of an amount of a TGF-β antagonist (e.g., GLEEVEC) effective to augment the anti-fibrotic effect of the synthetic Type I interferon receptor polypeptide agonist and Type II interferon receptor agonist combination therapy, for the desired treatment duration.

[0827] As non-limiting examples, any of the above-described treatment methods featuring therapy with a combined dosage of a subject synthetic Type I interferon receptor polypeptide agonist, a hyperglycosylated polypeptide variant, a protease-resistant polypeptide variant, or a hyperglycosylated, protease-resistant polypeptide variant and a Type II interferon receptor agonist effective for the treatment of a fibrotic disorder in a patient can be modified to include co-administration to the patient of an amount of an endothelin receptor antagonist (e.g., TRACLEER) effective to augment the anti-fibrotic effect of the synthetic Type I interferon receptor polypeptide agonist and Type II interferon receptor agonist combination therapy, for the desired treatment duration.

[0828] As non-limiting examples, any of the above-described treatment methods featuring therapy with a combined dosage of a subject synthetic Type I interferon receptor polypeptide agonist, a hyperglycosylated polypeptide variant, a protease-resistant polypeptide variant, or a hyperglycosylated, protease-resistant polypeptide variant and a Type II interferon receptor agonist effective for the treatment of a fibrotic disorder in a patient can be modified to include co-administration to the patient of a combined dosage of a SAPK inhibitor (e.g., pirfenidone or a pirfenidone analog) and a TNF antagonist (e.g., etancercept, infliximab, or adalimumab) effective to augment the anti-fibrotic effect of the synthetic Type I interferon receptor polypeptide agonist and Type II interferon receptor agonist combination therapy, for the desired treatment duration.

[0829] As non-limiting examples, any of the above-described treatment methods featuring therapy with a combined dosage of a subject synthetic Type I interferon receptor polypeptide agonist, a hyperglycosylated polypeptide variant, a protease-resistant polypeptide variant, or a hyperglycosylated, protease-resistant polypeptide variant and a Type II interferon receptor agonist effective for the treatment of a fibrotic disorder in a patient can be modified to include co-administration to the patient of a combined dosage of a SAPK inhibitor (e.g., pirfenidone or a pirfenidone analog) and a TGF-β antagonist (e.g., GLEEVEC) effective to augment the anti-fibrotic effect of the synthetic Type I interferon receptor polypeptide agonist and Type II interferon receptor agonist combination therapy, for the desired treatment duration.

[0830] As non-limiting examples, any of the above-described treatment methods featuring therapy with a combined dosage of a subject synthetic Type I interferon receptor polypeptide agonist, a hyperglycosylated polypeptide variant, a protease-resistant polypeptide variant, or a hyperglycosylated, protease-resistant polypeptide variant and a Type II interferon receptor agonist effective for the treatment of a fibrotic disorder in a patient can be modified to include co-administration to the patient of a combined dosage of a SAPK inhibitor (e.g., pirfenidone or a pirfenidone analog) and an endothelin receptor antagonist (e.g., TRACLEER) effective to augment the anti-fibrotic effect of the synthetic Type I interferon receptor polypeptide agonist and Type II interferon receptor agonist combination therapy, for the desired treatment duration.

[0831] As non-limiting examples, any of the above-described treatment methods featuring therapy with a combined dosage of a subject synthetic Type I interferon receptor polypeptide agonist, a hyperglycosylated polypeptide variant, a protease-resistant polypeptide variant, or a hyperglycosylated, protease-resistant polypeptide variant and a Type II interferon receptor agonist effective for the treatment of a fibrotic disorder in a patient can be modified to include co-administration to the patient of a combined dosage of a TNF antagonist (e.g., etanercept, infliximab, or adalimumab) and a TGF-β antagonist (e.g., GLEEVEC) effective to augment the anti-fibrotic effect of the synthetic Type I interferon receptor polypeptide agonist and Type II interferon receptor agonist combination therapy, for the desired treatment duration.

[0832] As non-limiting examples, any of the above-described treatment methods featuring therapy with a combined dosage of a subject synthetic Type I interferon receptor polypeptide agonist, a hyperglycosylated polypeptide variant, a protease-resistant polypeptide variant, or a hyperglycosylated, protease-resistant polypeptide variant and a Type II interferon receptor agonist effective for the treatment of a fibrotic disorder in a patient can be modified to include co-administration to the patient of a combined dosage of a TNF antagonist (e.g., etanercept, infliximab, or adalimumab) and an endothelin receptor antagonist (e.g., TRACLEER) effective to augment the anti-fibrotic effect of the synthetic Type I interferon receptor polypeptide agonist and Type II interferon receptor agonist combination therapy, for the desired treatment duration.

[0833] As non-limiting examples, any of the above-described treatment methods featuring therapy with a combined dosage of a subject synthetic Type I interferon receptor polypeptide agonist, a hyperglycosylated polypeptide variant, a protease-resistant polypeptide variant, or a hyperglycosylated, protease-resistant polypeptide variant and a Type II interferon receptor agonist effective for the treatment of a fibrotic disorder in a patient can be modified to include co-administration to the patient of a combined dosage of a TGF-β antagonist (e.g., GLEEVEC) and an endothelin receptor antagonist (e.g., TRACLEER) effective to augment the anti-fibrotic effect of the synthetic Type I interferon receptor polypeptide agonist and Type II interferon receptor agonist combination therapy, for the desired treatment duration.

[0834] As non-limiting examples, any of the above-described treatment methods featuring therapy with a combined dosage of a subject synthetic Type I interferon receptor polypeptide agonist, a hyperglycosylated polypeptide variant, a protease-resistant polypeptide variant, or a hyperglycosylated, protease-resistant polypeptide variant and a Type II interferon receptor agonist effective for the treatment of a fibrotic disorder in a patient can be modified to include co-administration to the patient of a combined dosage of a SAPK inhibitor (e.g., pirfenidone or a pirfenidone analog), TNF antagonist (e.g., etanercept, infliximab, or adalimumab) and a TGF-β antagonist (e.g., GLEEVEC) effective to augment the anti-fibrotic effect of the synthetic Type I interferon receptor polypeptide agonist and Type II interferon receptor agonist combination therapy, for the desired treatment duration.

[0835] As non-limiting examples, any of the above-described treatment methods featuring therapy with a combined dosage of a subject synthetic Type I interferon receptor polypeptide agonist, a hyperglycosylated polypeptide variant, a protease-resistant polypeptide variant, or a hyperglycosylated, protease-resistant polypeptide variant and a Type II interferon receptor agonist effective for the treatment of a fibrotic disorder in a patient can be modified to include co-administration to the patient of a combined dosage of a SAPK inhibitor (e.g., pirfenidone or a pirfenidone analog), TNF antagonist (e.g., etanercept, infliximab, or adalimumab) and an endothelin antagonist (e.g., TRACLEER) effective to augment the anti-fibrotic effect of the synthetic Type I interferon receptor polypeptide agonist and Type II interferon receptor agonist combination therapy, for the desired treatment duration.

[0836] As non-limiting examples, any of the above-described treatment methods featuring therapy with a combined dosage of a subject synthetic Type I interferon receptor polypeptide agonist, a hyperglycosylated polypeptide variant, a protease-resistant polypeptide variant, or a hyperglycosylated, protease-resistant polypeptide variant and a Type II interferon receptor agonist effective for the treatment of a fibrotic disorder in a patient can be modified to include co-administration to the patient of a combined dosage of TNF antagonist (e.g., etanercept, infliximab, or adalimumab), TGF-β antagonist (e.g., GLEEVEC) and an endothelin antagonist (e.g., TRACLEER) effective to augment the anti-fibrotic effect of the synthetic Type I interferon receptor polypeptide agonist and Type II interferon receptor agonist combination therapy, for the desired treatment duration.

[0837] As non-limiting examples, any of the above-described treatment methods featuring therapy with a combined dosage of a subject synthetic Type I interferon receptor polypeptide agonist, a hyperglycosylated polypeptide variant, a protease-resistant polypeptide variant, or a hyperglycosylated, protease-resistant polypeptide variant and a Type II interferon receptor agonist effective for the treatment of a fibrotic disorder in a patient can be modified to include co-administration to the patient of a combined dosage of a SAPK inhibitor (e.g., pirfenidone or a pirfenidone analog), TGF-β antagonist (e.g., GLEEVEC) and an endothelin antagonist (e.g., TRACLEER) effective to augment the anti-fibrotic effect of the synthetic Type I interferon receptor polypeptide agonist and Type II interferon receptor agonist combination therapy, for the desired treatment duration.

[0838] As non-limiting examples, any of the above-described treatment methods featuring therapy with a combined dosage of a subject synthetic Type I interferon receptor polypeptide agonist, a hyperglycosylated polypeptide variant, a protease-resistant polypeptide variant, or a hyperglycosylated, protease-resistant polypeptide variant and a Type II interferon receptor agonist effective for the treatment of a fibrotic disorder in a patient can be modified to include co-administration to the patient of a combined dosage of a SAPK inhibitor (e.g., pirfenidone or a pirfenidone analog), a TNF antagonist (e.g., etanercept, infliximab, or adalimumab), a TGF-β antagonist (e.g., GLEEVEC) and an endothelin antagonist (e.g., TRACLEER) effective to augment the anti-fibrotic effect of the synthetic Type I interferon receptor polypeptide agonist and Type II interferon receptor agonist combination therapy, for the desired treatment duration.

[0839] As non-limiting examples, any of the above-described treatment methods featuring therapy with a combined dosage of a subject synthetic Type I interferon receptor polypeptide agonist, a hyperglycosylated polypeptide variant, a protease-resistant polypeptide variant, or a hyperglycosylated, protease-resistant polypeptide variant and a Type II interferon receptor agonist effective for the treatment of a fibrotic disorder in a patient, with or without co-administration of one or more additional anti-fibrotic agent(s), can be further modified to include co-administration of an amount of N-acetylcysteine (NAC) effective to augment the anti-fibrotic effect of the combination therapy, for the desired treatment duration.

Cancer

[0840] The present invention provides a method of treating a proliferative disorder (e.g., cancer), the method generally involving administering to an individual in need thereof an effective amount of a subject synthetic Type I interferon receptor polypeptide agonist, a hyperglycosylated polypeptide variant, a protease-resistant polypeptide variant, or a hyperglycosylated, protease-resistant polypeptide variant.

[0841] The methods are effective to reduce the growth rate of a tumor by at least about 5%, at least about 10%, at least about 20%, at least about 25%, at least about 50%, at least about 75%, at least about 85%, or at least about 90%, up to total inhibition of growth of the tumor, when compared to a suitable control. Thus, in these embodiments, an “effective amount” of a subject synthetic Type I interferon receptor polypeptide agonist, a hyperglycosylated polypeptide variant, a protease-resistant polypeptide variant, or a hyperglycosylated, protease-resistant polypeptide variant is an amount that is sufficient to reduce tumor growth rate by at least about 5%, at least about 10%, at least about 20%, at least about 25%, at least about 50%, at least about 75%, at least about 85%, or at least about 90%, up to total inhibition of tumor growth, when compared to a suitable control. In an experimental animal system, a suitable control may be a genetically identical animal not treated with the synthetic Type I interferon receptor polypeptide agonist. In non-experimental systems, a suitable control may be the tumor load present before administering the synthetic Type I interferon receptor polypeptide agonist. Other suitable controls may be a placebo control.

[0842] Whether growth of a tumor is inhibited can be determined using any known method, including, but not limited to, a proliferation assay as described in the Example; a ³H-thymidine uptake assay; and the like.

[0843] The methods are useful for treating a wide variety of cancers, including carcinomas, sarcomas, leukemias, and lymphomas.

[0844] Carcinomas that can be treated using a subject method include, but are not limited to, esophageal carcinoma, hepatocellular carcinoma, basal cell carcinoma (a form of skin cancer), squamous cell carcinoma (various tissues), bladder carcinoma, including transitional cell carcinoma (a malignant neoplasm of the bladder), bronchogenic carcinoma, colon carcinoma, colorectal carcinoma, gastric carcinoma, lung carcinoma, including small cell carcinoma and non-small cell carcinoma of the lung, adrenocortical carcinoma, thyroid carcinoma, pancreatic carcinoma, breast carcinoma, ovarian carcinoma, prostate carcinoma, adenocarcinoma, sweat gland carcinoma, sebaceous gland carcinoma, papillary carcinoma, papillary adenocarcinoma, cystadenocarcinoma, medullary carcinoma, renal cell carcinoma, ductal carcinoma in situ or bile duct carcinoma, choriocarcinoma, seminoma, embryonal carcinoma, Wilm's tumor, cervical carcinoma, uterine carcinoma, testicular carcinoma, osteogenic carcinoma, epithelieal carcinoma, and nasopharyngeal carcinoma, etc.

[0845] Sarcomas that can be treated using a subject method include, but are not limited to, fibrosarcoma, myxosarcoma, liposarcoma, chondrosarcoma, chordoma, osteogenic sarcoma, osteosarcoma, angiosarcoma, endotheliosarcoma, lymphangiosarcoma, lymphangioendotheliosarcoma, synovioma, mesothelioma, Ewing's sarcoma, leiomyosarcoma, rhabdomyosarcoma, and other soft tissue sarcomas.

[0846] Other solid tumors that can be treated using a subject method include, but are not limited to, glioma, astrocytoma, medulloblastoma, craniopharyngioma, ependymoma, pinealoma, hemangioblastoma, acoustic neuroma, oligodendroglioma, menangioma, melanoma, neuroblastoma, and retinoblastoma.

[0847] Leukemias that can be treated using a subject method include, but are not limited to, a) chronic myeloproliferative syndromes (neoplastic disorders of multipotential hematopoietic stem cells); b) acute myelogenous leukemias (neoplastic transformation of a multipotential hematopoietic stem cell or a hematopoietic cell of restricted lineage potential; c) chronic lymphocytic leukemias (CLL; clonal proliferation of immunologically immature and functionally incompetent small lymphocytes), including B-cell CLL, T-cell CLL prolymphocytic leukemia, and hairy cell leukemia; and d) acute lymphoblastic leukemias (characterized by accumulation of lymphoblasts). Lymphomas that can be treated using a subject method include, but are not limited to, B-cell lymphomas (e.g., Burkitt's lymphoma); Hodgkin's lymphoma; and the like.

Combination Therapies

[0848] In some embodiments, the present invention provides combination therapies for the treatment of cancer. Accordingly, the present invention provides a method of treating cancer, generally involving administering a subject synthetic Type I interferon receptor polypeptide agonist, a hyperglycosylated polypeptide variant, a protease-resistant polypeptide variant, or a hyperglycosylated, protease-resistant polypeptide variant in combination therapy with at least a second therapeutic agent.

[0849] In other embodiments, the present invention provides methods of treating cancer that involve administering a synergistic combination of a subject synthetic Type I interferon receptor polypeptide agonist, a hyperglycosylated polypeptide variant, a protease-resistant polypeptide variant, or a hyperglycosylated, protease-resistant polypeptide variant and a second therapeutic agent. As used herein, a “synergistic combination” of a subject synthetic Type I interferon receptor polypeptide agonist, a hyperglycosylated polypeptide variant, a protease-resistant polypeptide variant, or a hyperglycosylated, protease-resistant polypeptide variant and a second therapeutic agent is a combined dosage that is more effective in the therapeutic or prophylactic treatment of cancer than the incremental improvement in treatment outcome that could be predicted or expected from a merely additive combination of (i) the therapeutic or prophylactic benefit of a subject synthetic Type I interferon receptor polypeptide agonist, a hyperglycosylated polypeptide variant, a protease-resistant polypeptide variant, or a hyperglycosylated, protease-resistant polypeptide variant when administered at that same dosage as a monotherapy and (ii) the therapeutic or prophylactic benefit of the second therapeutic agent when administered at the same dosage as a monotherapy.

[0850] In some embodiments, a subject synthetic Type I interferon receptor polypeptide agonist, a hyperglycosylated polypeptide variant, a protease-resistant polypeptide variant, or a hyperglycosylated, protease-resistant polypeptide variant is administered as an adjuvant therapy to a standard cancer therapy. Standard cancer therapies include surgery (e.g., surgical removal of cancerous tissue), radiation therapy, bone marrow transplantation, chemotherapeutic treatment, biological response modifier treatment, and certain combinations of the foregoing.

[0851] Radiation therapy includes, but is not limited to, x-rays or gamma rays that are delivered from either an externally applied source such as a beam, or by implantation of small radioactive sources.

[0852] Chemotherapeutic agents are non-peptidic (i.e., non-proteinaceous) compounds that reduce proliferation of cancer cells, and encompass cytotoxic agents and cytostatic agents. Non-limiting examples of chemotherapeutic agents include alkylating agents, nitrosoureas, antimetabolites, antitumor antibiotics, plant (vinca) alkaloids, and steroid hormones.

[0853] Agents that act to reduce cellular proliferation are known in the art and widely used. Such agents include alkylating agents, such as nitrogen mustards, nitrosoureas, ethylenimine derivatives, alkyl sulfonates, and triazenes, including, but not limited to, mechlorethamine, cyclophosphamide (Cytoxan™), melphalan (L-sarcolysin), carmustine (BCNU), lomustine (CCNU), semustine (methyl-CCNU), streptozocin, chlorozotocin, uracil mustard, chlormethine, ifosfamide, chlorambucil, pipobroman, triethylenemelamine, triethylenethiophosphoramine, busulfan, dacarbazine, and temozolomide.

[0854] Antimetabolite agents include folic acid analogs, pyrimidine analogs, purine analogs, and adenosine deaminase inhibitors, including, but not limited to, cytarabine (CYTOSAR-U), cytosine arabinoside, fluorouracil (5-FU), floxuridine (FudR), 6-thioguanine, 6-mercaptopurine (6-MP), pentostatin, 5-fluorouracil (5-FU), methotrexate, 10-propargyl-5,8-dideazafolate (PDDF, CB3717), 5,8-dideazatetrahydrofolic acid (DDATHF), leucovorin, fludarabine phosphate, pentostatine, and gemcitabine.

[0855] Suitable natural products and their derivatives, (e.g., vinca alkaloids, antitumor antibiotics, enzymes, lymphokines, and epipodophyllotoxins), include, but are not limited to, Ara-C, paclitaxel (Taxol®), docetaxel (Taxotere®), deoxycoformycin, mitomycin-C, L-asparaginase, azathioprine; brequinar; alkaloids, e.g. vincristine, vinblastine, vinorelbine, vindesine, etc.; podophyllotoxins, e.g. etoposide, teniposide, etc.; antibiotics, e.g. anthracycline, daunorubicin hydrochloride (daunomycin, rubidomycin, cerubidine), idarubicin, doxorubicin, epirubicin and morpholino derivatives, etc.; phenoxizone biscyclopeptides, e.g. dactinomycin; basic glycopeptides, e.g. bleomycin; anthraquinone glycosides, e.g. plicamycin (mithramycin); anthracenediones, e.g. mitoxantrone; azirinopyrrolo indolediones, e.g. mitomycin; macrocyclic immunosuppressants, e.g. cyclosporine, FK-506 (tacrolimus, prograf), raparnycin, etc.; and the like.

[0856] Other anti-proliferative cytotoxic agents are navelbene, CPT-11, anastrazole, letrazole, capecitabine, reloxafine, cyclophosphamide, ifosamide, and droloxafine.

[0857] Microtubule affecting agents that have antiproliferative activity are also suitable for use and include, but are not limited to, allocolchicine (NSC 406042), Halichondrin B (NSC 609395), colchicine (NSC 757), colchicine derivatives (e.g., NSC 33410), dolstatin 10 (NSC 376128), maytansine (NSC 153858), rhizoxin (NSC 332598), paclitaxel (Taxol®), Taxol® derivatives, docetaxel (Taxotere®), thiocolchicine (NSC 361792), trityl cysterin, vinblastine sulfate, vincristine sulfate, natural and synthetic epothilones including but not limited to, eopthilone A, epothilone B, discodermolide; estramustine, nocodazole, and the like.

[0858] Hormone modulators and steroids (including synthetic analogs) that are suitable for use include, but are not limited to, adrenocorticosteroids, e.g. prednisone, dexamethasone, etc.; estrogens and pregestins, e.g. hydroxyprogesterone caproate, medroxyprogesterone acetate, megestrol acetate, estradiol, clomiphene, tamoxifen; etc.; and adrenocortical suppressants, e.g. aminoglutethimide; 17α-ethinylestradiol; diethylstilbestrol, testosterone, fluoxymesterone, dromostanolone propionate, testolactone, methylprednisolone, methyl-testosterone, prednisolone, triamcinolone, chlorotrianisene, hydroxyprogesterone, aminoglutethimide, estramustine, medroxyprogesterone acetate, leuprolide, Flutamide (Drogenil), Toremifene (Fareston), and Zoladex®. Estrogens stimulate proliferation and differentiation, therefore compounds that bind to the estrogen receptor are used to block this activity. Corticosteroids may inhibit T cell proliferation.

[0859] Other chemotherapeutic agents include metal complexes, e.g. cisplatin (cis-DDP), carboplatin, etc.; ureas, e.g. hydroxyurea; and hydrazines, e.g. N-methylhydrazine; epidophyllotoxin; a topoisomerase inhibitor; procarbazine; mitoxantrone; leucovorin; tegafur; etc. Other anti-proliferative agents of interest include immunosuppressants, e.g. mycophenolic acid, thalidomide, desoxyspergualin, azasporine, leflunomide, mizoribine, azaspirane (SKF 105685); Iressa® (ZD 1839, 4-(3-chloro-4-fluorophenylamino)-7-methoxy-6-(3-(4-morpholinyl)propoxy)quinazoline); etc.

[0860] “Taxanes” include paclitaxel, as well as any active taxane derivative or pro-drug. “Paclitaxel” (which should be understood herein to include analogues, formulations, and derivatives such as, for example, docetaxel, TAXOL™, TAXOTERE™ (a formulation of docetaxel), 10-desacetyl analogs of paclitaxel and 3′N-desbenzoyl-3′N-t-butoxycarbonyl analogs of paclitaxel) may be readily prepared utilizing techniques known to those skilled in the art (see also WO 94/07882, WO 94/07881, WO 94/07880, WO 94/07876, WO 93/23555, WO 93/10076; U.S. Pat. Nos. 5,294,637; 5,283,253; 5,279,949; 5,274,137; 5,202,448; 5,200,534; 5,229,529; and EP 590,267), or obtained from a variety of commercial sources, including for example, Sigma Chemical Co., St. Louis, Mo. (T7402 from Taxus brevifolia; or T-1912 from Taxus yannanensis).

[0861] Paclitaxel should be understood to refer to not only the common chemically available form of paclitaxel, but analogs and derivatives (e.g., Taxotere™ docetaxel, as noted above) and paclitaxel conjugates (e.g., paclitaxel-PEG, paclitaxel-dextran, or paclitaxel-xylose).

[0862] Also included within the term “taxane” are a variety of known derivatives, including both hydrophilic derivatives, and hydrophobic derivatives. Taxane derivatives include, but not limited to, galactose and mannose derivatives described in International Patent Application No. WO 102/18113; piperazino and other derivatives described in WO 102/14209; taxane derivatives described in WO 102/09021, WO 98/22451, and U.S. Pat. No. 5,869,680; 6-thio derivatives described in WO 98/28288; sulfenamide derivatives described in U.S. Pat. No. 5,821,263; and taxol derivative described in U.S. Pat. No. 5,415,869. It further includes prodrugs of paclitaxel including, but not limited to, those described in WO 98/58927; WO 98/13059; and U.S. Pat. No. 5,824,701.

[0863] Biological response modifiers suitable for use in connection with the methods of the invention include, but are not limited to, (1) inhibitors of tyrosine kinase (RTK) activity; (2) inhibitors of serine/threonine kinase activity; (3) tumor-associated antigen antagonists, such as antibodies that bind specifically to a tumor antigen; (4) apoptosis receptor agonists; (5) interleukin-2; (6) IFN-α; (7) IFN-γ (8) colony-stimulating factors; and (9) inhibitors of angiogenesis.

[0864] In one aspect, the invention contemplates the combination of a subject synthetic Type I interferon receptor polypeptide agonist, a hyperglycosylated polypeptide variant, a protease-resistant polypeptide variant, or a hyperglycosylated, protease-resistant polypeptide variant as an adjuvant to any therapy in which the cancer patient receives treatment with at least one additional antineoplastic drug, where the additional drug is a tyrosine kinase inhibitor. In some embodiments, the tyrosine kinase inhibitor is a receptor tyrosine kinase (RTK) inhibitor, such as type I receptor tyrosine kinase inhibitors (e.g., inhibitors of epidermal growth factor receptors), type II receptor tyrosine kinase inhibitors (e.g., inhibitors of insulin receptor), type III receptor tyrosine kinase inhibitors (e.g., inhibitors of platelet-derived growth factor receptor), and type IV receptor tyrosine kinase inhibitors (e.g., fibroblast growth factor receptor). In other embodiments, the tyrosine kinase inhibitor is a non-receptor tyrosine kinase inhibitor, such as inhibitors of src kinases or janus kinases.

[0865] In another aspect, the invention contemplates the combination of a subject synthetic Type I interferon receptor polypeptide agonist, a hyperglycosylated polypeptide variant, a protease-resistant polypeptide variant, or a hyperglycosylated, protease-resistant polypeptide variant as an adjuvant to any therapy in which the cancer patient receives treatment with at least one additional antineoplastic drug, where the additional drug is an inhibitor of a receptor tyrosine kinase involved in growth factor signaling pathway(s). In some embodiments, the inhibitor is genistein. In other embodiments, the inhibitor is an EGFR tyrosine kinase-specific antagonist, such as IRESSA™ gefitinib (ZD18398; Novartis), TARCEVA™ erolotinib (OSI-774; Roche; Genentech; OSI Pharmaceuticals), or tyrphostin AG1478 (4-(3-chloroanilino)-6,7-dimethoxyquinazoline. In still other embodiments, the inhibitor is any indolinone antagonist of Flk-1/KDR (VEGF-R2) tyrosine kinase activity described in U.S. Patent Application Publication No. 2002/0183364 A1, such as the indolinone antagonists of Flk-1/KDR (VEGF-R2) tyrosine kinase activity disclosed in Table 1 on pages 4-5 thereof. In further embodiments, the inhibitor is any of the substituted 3-[(4,5,6,7-tetrahydro-1H-indol-2-yl)methylene]-1,3-dihydroindol-2-one antagonists of Flk-1/KDR (VEGF-R2), FGF-R1 or PDGF-R tyrosine kinase activity disclosed in Sun, L., et al., J. Med. Chem., 43(14): 2655-2663 (2000). In additional embodiments, the inhibitor is any substituted 3-[(3- or 4-carboxyethylpyrrol-2-yl)methylidenyl]indolin-2-one antagonist of Flt-1 (VEGF-R1), Flk-1/KDR (VEGF-R2), FGF-R1 or PDGF-R tyrosine kinase activity disclosed in Sun, L., et al., J. Med. Chem., 42(25): 5120-5130 (11029).

[0866] In another aspect, the invention contemplates the combination of a subject synthetic Type I interferon receptor polypeptide agonist, a hyperglycosylated polypeptide variant, a protease-resistant polypeptide variant, or a hyperglycosylated, protease-resistant polypeptide variant as an adjuvant to any therapy in which the cancer patient receives treatment with at least one additional antineoplastic drug, where the additional drug is an inhibitor of a non-receptor tyrosine kinase involved in growth factor signaling pathway(s). In some embodiments, the inhibitor is an antagonist of JAK2 tyrosine kinase activity, such as tyrphostin AG490 (2-cyano-3-(3,4-dihydroxyphenyl)-N-(benzyl)-2-propenamide). In other embodiments, the inhibitor is an antagonist of bcr-abl tyrosine kinase activity, such as GLEEVEC™ imatinib mesylate (STI-571; Novartis).

[0867] In another aspect, the invention contemplates the combination of a subject synthetic Type I interferon receptor polypeptide agonist, a hyperglycosylated polypeptide variant, a protease-resistant polypeptide variant, or a hyperglycosylated, protease-resistant polypeptide variant as an adjuvant to any therapy in which the cancer patient receives treatment with at least one additional antineoplastic drug, where the additional drug is an inhibitor of one or more kinases involved in cell cycle regulation. In some embodiments, the inhibitor is an antagonist of CDK2 activation, such as tryphostin AG490 (2-cyano-3-(3,4-dihydroxyphenyl)-N-(benzyl)-2-propenamide). In other embodiments, the inhibitor is an antagonist of CDK1/cyclin B activity, such as alsterpaullone. In still other embodiments, the inhibitor is an antagonist of CDK2 kinase activity, such as indirubin-3′-monoxime. In additional embodiments, the inhibitor is an ATP pool antagonist, such as lometrexol (described in U.S. Patent Application Publication No. 2002/0156023 A1).

[0868] In another aspect, the invention contemplates the combination of a subject synthetic Type I interferon receptor polypeptide agonist, a hyperglycosylated polypeptide variant, a protease-resistant polypeptide variant, or a hyperglycosylated, protease-resistant polypeptide variant as an adjuvant to any therapy in which the cancer patient receives treatment with at least one additional antineoplastic drug, where the additional drug is a tumor-associated antigen antagonist, such as an antibody antagonist. In some embodiments involving the treatment of HER2-expressing tumors, the tumor-associated antigen antagonist is an anti-HER2 monoclonal antibody, such as HERCEPTIN™ trastuzumab. In some embodiments involving the treatment of CD20-expressing tumors, such as B-cell lymphomas, the tumor-associated antigen antagonist is an anti-CD20 monoclonal antibody, such as RITUXAN™ rituximab.

[0869] In another aspect, the invention contemplates the combination of a subject synthetic Type I interferon receptor polypeptide agonist, a hyperglycosylated polypeptide variant, a protease-resistant polypeptide variant, or a hyperglycosylated, protease-resistant polypeptide variant as an adjuvant to any therapy in which the cancer patient receives treatment with at least one additional antineoplastic drug, where the additional drug is a tumor growth factor antagonist. In some embodiments, the tumor growth factor antagonist is an antagonist of epidermal growth factor (EGF), such as an anti-EGF monoclonal antibody. In other embodiments, the tumor growth factor antagonist is an antagonist of epidermal growth factor receptor erbB1 (EGFR), such as an anti-EGFR monoclonal antibody inhibitor of EGFR activation or signal transduction, e.g. ERBITUX™ cetuximab.

[0870] In another aspect, the invention contemplates the combination of a subject synthetic Type I interferon receptor polypeptide agonist, a hyperglycosylated polypeptide variant, a protease-resistant polypeptide variant, or a hyperglycosylated, protease-resistant polypeptide variant as an adjuvant to any therapy in which the cancer patient receives treatment with at least one additional antineoplastic drug, where the additional drug is an Apo-2 ligand agonist. In some embodiments, the Apo-2 ligand agonist is any of the Apo-2 ligand polypeptides described in WO 97/25428.

[0871] In another aspect, the invention contemplates the combination of a subject synthetic Type I interferon receptor polypeptide agonist, a hyperglycosylated polypeptide variant, a protease-resistant polypeptide variant, or a hyperglycosylated, protease-resistant polypeptide variant as an adjuvant to any therapy in which the cancer patient receives treatment with at least one additional antineoplastic drug, where the additional drug is an anti-angiogenic agent. In some embodiments, the anti-angiogenic agent is a vascular endothelial cell growth factor (VEGF) antagonist, such as an anti-VEGF monoclonal antibody, e.g. AVASTIN™ bevacizumab (Genentech). In other embodiments, the anti-angiogenic agent is an antagonist of VEGF-R1, such as an anti-VEGF-R1 monoclonal antibody. In other embodiments, the anti-angiogenic agent is an antagonist of VEGF-R2, such as an anti-VEGF-R2 monoclonal antibody. In other embodiments, the anti-angiogenic agent is an antagonist of basic fibroblast growth factor (bFGF), such as an anti-bFGF monoclonal antibody. In other embodiments, the anti-angiogenic factor is an antagonist of bFGF receptor, such as an anti-bFGF receptor monoclonal antibody. In other embodiments, the anti-angiogenic agent is an antagonist of TGF-β, such as an anti-TGF-β monoclonal antibody. In other embodiments, the anti-angiogenic agent is an antagonist of TGF-β receptor, such as an anti-TGF-P receptor monoclonal antibody. In other embodiments, the anti-angiogenic agent is a retinoic acid receptor (RXR) ligand, such as any RXR ligand described in U.S. Patent Application Publication No. 2001/0036955 A1 or in any of U.S. Pat. Nos. 5,824,685; 5,780,676; 5,3102,586; 5,466,861; 4,810,804; 5,770,378; 5,770,383; or 5,770,382. In still other embodiments, the anti-angiogenic agent is a peroxisome proliferator-activated receptor (PPAR) gamma ligand, such as any PPAR gamma ligand described in U.S. Patent Application Publication No. 2001/0036955 A1.

[0872] As non-limiting examples, any of the above-described treatment methods featuring therapy with an effective amount of a subject synthetic Type I interferon receptor polypeptide agonist, a hyperglycosylated polypeptide variant, a protease-resistant polypeptide variant, or a hyperglycosylated, protease-resistant polypeptide variant for the treatment of cancer in a patient can be modified to include co-administration to the patient of an amount of IFN-γ effective to augment the anti-cancer effect of the synthetic Type I interferon receptor polypeptide agonist therapy, for the desired treatment duration.

[0873] As non-limiting examples, any of the above-described treatment methods featuring therapy with an effective amount of a subject synthetic Type I interferon receptor polypeptide agonist, a hyperglycosylated polypeptide variant, a protease-resistant polypeptide variant, or a hyperglycosylated, protease-resistant polypeptide variant for the treatment of cancer in a patient can be modified to include co-administration to the patient of an amount of a SAPK inhibitor (e.g., pirfenidone or a pirfenidone analog) effective to augment the anti-cancer effect of the synthetic Type I interferon receptor polypeptide agonist therapy, for the desired treatment duration.

[0874] As non-limiting examples, any of the above-described treatment methods featuring therapy with an effective amount of a subject synthetic Type I interferon receptor polypeptide agonist, a hyperglycosylated polypeptide variant, a protease-resistant polypeptide variant, or a hyperglycosylated, protease-resistant polypeptide variant for the treatment of cancer in a patient can be modified to include co-administration to the patient of an amount of IFN-γ and an amount of a SAPK inhibitor (e.g., pirfenidone or a pirfenidone analog) effective to augment the anti-cancer effect of the synthetic Type I interferon receptor polypeptide agonist therapy, for the desired treatment duration.

[0875] As non-limiting examples, any of the above-described treatment methods featuring combination therapy with an amount of a subject synthetic Type I interferon receptor polypeptide agonist, a hyperglycosylated polypeptide variant, a protease-resistant polypeptide variant, or a hyperglycosylated, protease-resistant polypeptide variant and an amount of an additional anti-cancer agent, other than IFN-γ, effective for the treatment of cancer in a patient can be modified to include co-administration to the patient of an amount of IFN-γ effective to augment the anti-cancer effect of the synthetic Type I interferon receptor polypeptide agonist and additional anti-cancer agent combination therapy, for the desired treatment duration.

[0876] As non-limiting examples, any of the above-described treatment methods featuring combination therapy with an amount of a subject synthetic Type I interferon receptor polypeptide agonist, a hyperglycosylated polypeptide variant, a protease-resistant polypeptide variant, or a hyperglycosylated, protease-resistant polypeptide variant and an amount of an additional anti-cancer agent, other than a SAPK inhibitor (e.g., pirfenidone or a pirfenidone analog), effective for the treatment of cancer in a patient can be modified to include co-administration to the patient of an amount of a SAPK inhibitor (e.g., pirfenidone or a pirfenidone analog) effective to augment the anti-cancer effect of the synthetic Type I interferon receptor polypeptide agonist and additional anti-cancer agent combination therapy, for the desired treatment duration.

[0877] As non-limiting examples, any of the above-described treatment methods featuring combination therapy with an amount of a subject synthetic Type I interferon receptor polypeptide agonist, a hyperglycosylated polypeptide variant, a protease-resistant polypeptide variant, or a hyperglycosylated, protease-resistant polypeptide variant and an amount of an additional anti-cancer agent, other than IFN-γ or a SAPK inhibitor (e.g., pirfenidone or a pirfenidone analog), effective for the treatment of cancer in a patient can be modified to include co-administration to the patient of an amount of IFN-γ and an amount of a SAPK inhibitor (e.g., pirfenidone or a pirfenidone analog) that are effective to augment the anti-cancer effect of the synthetic Type I interferon receptor polypeptide agonist and additional anti-cancer agent combination therapy, for the desired treatment duration.

Viral Infections

[0878] The present invention provides methods of treating a virus infection, and methods of reducing viral load, or reducing the time to viral clearance, or reducing morbidity or mortality in the clinical outcomes, in patients suffering from a virus infection. The present invention further provides methods of reducing the risk that an individual will develop a pathological viral infection that has clinical sequelae. The methods generally involve administering a therapeutically effective amount of a subject synthetic Type I interferon receptor polypeptide agonist, a hyperglycosylated polypeptide variant, a protease-resistant polypeptide variant, or a hyperglycosylated, protease-resistant polypeptide variant for the treatment of a virus infection.

[0879] In some embodiments, a subject treatment method is prophylactic. Where a subject treatment method is prophylactic, the methods reduce the risk that an individual will develop pathological infection with a virus. An effective amount of a subject synthetic Type I interferon receptor polypeptide agonist, a hyperglycosylated polypeptide variant, a protease-resistant polypeptide variant, or a hyperglycosylated, protease-resistant polypeptide variant is an amount that reduces the risk or reduces the probability that an individual will develop a pathological infection with a virus. For example, an effective amount reduces the risk that an individual will develop a pathological infection by at least about 10%, at least about 20%, at least about 25%, at least about 30%, at least about 35%, at least about 40%, at least about 50%, at least about 60%, at least about 70%, at least about 80%, at least about 90%, or more, compared to the risk of developing a pathological infection with the virus in the absence of treatment with a subject agent.

[0880] In some embodiments, an effective amount of a subject synthetic Type I interferon receptor polypeptide agonist, a hyperglycosylated polypeptide variant, a protease-resistant polypeptide variant, or a hyperglycosylated, protease-resistant polypeptide variant is an amount that reduces viral load by at least about 10%, at least about 20%, at least about 25%, at least about 30%, at least about 35%, at least about 40%, at least about 50%, at least about 60%, at least about 70%, at least about 80%, at least about 90%, or more, compared to the viral load in the absence of treatment with the subject agent.

[0881] In some embodiments, an effective amount of a subject synthetic Type I interferon receptor polypeptide agonist, a hyperglycosylated polypeptide variant, a protease-resistant polypeptide variant, or a hyperglycosylated, protease-resistant polypeptide variant is an amount that that reduces the time to viral clearance, by at least about 10%, at least about 20%, at least about 25%, at least about 30%, at least about 35%, at least about 40%, at least about 50%, at least about 60%, at least about 70%, at least about 80%, at least about 90%, or more, compared to the time to viral clearance in the absence of treatment.

[0882] In some embodiments, an effective amount of a subject synthetic Type I interferon receptor polypeptide agonist, a hyperglycosylated polypeptide variant, a protease-resistant polypeptide variant, or a hyperglycosylated, protease-resistant polypeptide variant is an amount that reduces morbidity or mortality due to a virus infection by at least about 10%, at least about 20%, at least about 25%, at least about 30%, at least about 35%, at least about 40%, at least about 50%, at least about 60%, at least about 70%, at least about 80%, at least about 90%, or more, compared to the morbidity or mortality in the absence of treatment.

[0883] Whether a subject treatment method is effective in reducing the risk of a pathological virus infection, reducing viral load, reducing time to viral clearance, or reducing morbidity or mortality due to a virus infection is readily determined by those skilled in the art. Viral load is readily measured by measuring the titer or level of virus in serum. The number of virus in the serum can be determined using any known assay, including, e.g., a quantitative polymerase chain reaction assay using oligonucleotide primers specific for the virus being assayed. Whether morbidity is reduced can be determined by measuring any symptom associated with a virus infection, including, e.g., fever, respiratory symptoms (e.g., cough, ease or difficulty of breathing, and the like.)

[0884] In some embodiments, the present invention provides a method of reducing viral load, and/or reducing the time to viral clearance, and/or reducing morbidity or mortality in an individual who has been exposed to a virus (e.g., an individual who has come into contact with an individual infected with a virus), the method involving administering an effective amount of subject synthetic Type I interferon receptor polypeptide agonist. In these embodiments, therapy is begun from about 1 hour to about 14 days following exposure, e.g., from about 1 hour to about 24 hours, from about 24 hours to about 48 hours, from about 48 hours to about 3 days, from about 3 days to about 4 days, from about 4 days to about 7 days, from about 7 days to about 10 days, or from about 10 days to about 14 days following exposure to the virus.

[0885] In some embodiments, the present invention provides a method of reducing the risk that an individual who has been exposed to a virus (e.g., an individual who has come into contact with an individual infected with a virus) will develop a pathological virus infection with clinical sequelae, the method involving administering an effective amount of a subject synthetic Type I interferon receptor polypeptide agonist, a hyperglycosylated polypeptide variant, a protease-resistant polypeptide variant, or a hyperglycosylated, protease-resistant polypeptide variant. In these embodiments, therapy is begun from about 1 hour to about 35 days following exposure, e.g., from about 1 hour to about 24 hours, from about 24 hours to about 48 hours, from about 48 hours to about 3 days, from about 3 days to about 4 days, from about 4 days to about 7 days, from about 7 days to about 10 days, from about 10 days to about 14 days, from about 14 days to about 21 days, or from about 21 days to about 35 days following exposure to the virus.

[0886] In some embodiments, the present invention provides methods of reducing viral load, and/or reducing the time to viral clearance, and/or reducing morbidity or mortality in an individual who may or may not have been infected with a virus, and who has been exposed to a virus. In some of these embodiments, the methods involve administering an effective amount of a subject synthetic Type I interferon receptor polypeptide agonist, a hyperglycosylated polypeptide variant, a protease-resistant polypeptide variant, or a hyperglycosylated, protease-resistant polypeptide variant within 24 hours of exposure to the virus.

[0887] In some embodiments, the present invention provides methods of reducing viral load, and/or reducing the time to viral clearance, and/or reducing morbidity or mortality in an individual who has not been infected with a virus, and who has been exposed to a virus. In some of these embodiments, the methods involve administering effective amounts of a SAPK inhibitor (e.g., pirfenidone or a pirfenidone analog) and a Type I interferon receptor agonist within 48 hours of exposure to the virus.

[0888] In some embodiments, the present invention provides methods of reducing viral load, and/or reducing the time to viral clearance, and/or reducing morbidity or mortality in an individual who has not been infected with a virus, and who has been exposed to a virus. The methods involve administering a subject agent more than 48 hours after exposure to the virus, e.g., from 72 hours to about 35 days, e.g., 72 hours, 4 days, 5 days, 6 days, or 7 days after exposure, or from about 7 days to about 10 days, from about 10 days to about 14 days, from about 14 days to about 17 days, from about 17 days to about 21 days, from about 21 days to about 25 days, from about 25 days to about 30 days, or from about 30 days to about 35 days after exposure to the virus. In some of these embodiments, the methods involve administering an effective amount of a subject synthetic Type I interferon receptor polypeptide agonist, a hyperglycosylated polypeptide variant, a protease-resistant polypeptide variant, or a hyperglycosylated, protease-resistant polypeptide variant more than 48 hours after exposure to the virus.

[0889] In some embodiments, the present invention provides a method of reducing the risk that an individual who has been exposed to a virus will develop a pathological virus infection with clinical sequelae. In some of these embodiments, the methods involve administering an effective amount of a subject synthetic Type I interferon receptor polypeptide agonist, a hyperglycosylated polypeptide variant, a protease-resistant polypeptide variant, or a hyperglycosylated, protease-resistant polypeptide variant within 24 hours of exposure to the virus.

[0890] In some embodiments, the present invention provides a method of reducing the risk that an individual who has been exposed to a virus (e.g., an individual who has come into contact with an individual infected with a virus) will develop a pathological viral infection with clinical sequelae. In some of these embodiments, the methods involve administering an effective amount of a subject synthetic Type I interferon receptor polypeptide agonist, a hyperglycosylated polypeptide variant, a protease-resistant polypeptide variant, or a hyperglycosylated, protease-resistant polypeptide variant within 48 hours of exposure to the virus.

Hepatitis Virus Infection

[0891] The present invention provides methods of treating a hepatitis virus infection. In particular embodiments, the present invention provides methods of treating a hepatitis C virus (HCV) infection; methods of reducing the incidence of complications associated with HCV and cirrhosis of the liver; and methods of reducing viral load, or reducing the time to viral clearance, or reducing morbidity or mortality in the clinical outcomes, in patients suffering from HCV infection. The methods generally involve administering to the individual an effective amount of a subject synthetic Type I interferon receptor polypeptide agonist, a hyperglycosylated polypeptide variant, a protease-resistant polypeptide variant, or a hyperglycosylated, protease-resistant polypeptide variant.

[0892] In many embodiments, a subject treatment method is effective to decrease viral load in the individual, and to achieve a sustained viral response. Optionally, the subject method further provides administering to the individual an effective amount of a nucleoside analog, such as ribavirin, levovirin, and viramidine. Of particular interest in many embodiments is treatment of humans.

[0893] Whether a subject method is effective in treating an HCV infection can be determined by measuring viral load, or by measuring a parameter associated with HCV infection, including, but not limited to, liver fibrosis, elevations in serum transaminase levels, and necroinflammatory activity in the liver. Indicators of liver fibrosis are discussed in detail below.

[0894] Viral load can be measured by measuring the titer or level of virus in serum. These methods include, but are not limited to, a quantitative polymerase chain reaction (PCR) and a branched DNA (bDNA) test. Quantitative assays for measuring the viral load (titer) of HCV RNA have been developed. Many such assays are available commercially, including a quantitative reverse transcription PCR (RT-PCR) (Amplicor HCV Monitor™, Roche Molecular Systems, New Jersey); and a branched DNA (deoxyribonucleic acid) signal amplification assay (Quantiplex™ HCV RNA Assay (bDNA), Chiron Corp., Emeryville, Calif.). See, e.g., Gretch et al. (11025) Ann. Intern. Med. 123:321-329. Also of interest is a nucleic acid test (NAT), developed by Gen-Probe Inc. (San Diego) and Chiron Corporation, and sold by Chiron Corporation under the trade name Procleix®, which NAT simultaneously tests for the presence of HIV-1 and HCV. See, e.g., Vargo et al. (2002) Transfusion 42:876-885.

[0895] In general, an effective amount of a subject agent (e.g., a subject synthetic Type I interferon receptor polypeptide agonist, a hyperglycosylated polypeptide variant, a protease-resistant polypeptide variant, or a hyperglycosylated, protease-resistant polypeptide variant) is an amount that is effective to reduce viral load to undetectable levels, e.g., to less than about 5000, less than about 1000, less than about 500, or less than about 200 genome copies/mL serum. In some embodiments, an effective amount of a subject agent is an amount that is effective to reduce viral load to less than 100 genome copies/mL serum. In many embodiments, the methods of the invention achieve a sustained viral response, e.g., the viral load is reduced to undetectable levels for a period of at least about one month, at least about two months, at least about three months, at least about four months, at least about five months, or at least about six months following cessation of treatment.

[0896] Whether a subject method is effective in treating an HCV infection can be determined by measuring a parameter associated with HCV infection, such as liver fibrosis. Methods of determining the extent of liver fibrosis are discussed in detail below. In some embodiments, the level of a serum marker of liver fibrosis indicates the degree of liver fibrosis.

[0897] As one non-limiting example, levels of serum alanine aminotransferase (ALT) are measured, using standard assays. In general, an ALT level of less than about 45 international units is considered normal. In some embodiments, an effective amount of a therapeutic agent that is administered as part of a subject combination therapy is an amount effective to reduce ALT levels to less than about 45 U/ml serum.

Combination Therapies

[0898] In some embodiments, the present invention provides combination therapies for the treatment of a viral infection. Accordingly, the present invention provides a method of treating a viral infection, generally involving administering a subject synthetic Type I interferon receptor polypeptide agonist, a hyperglycosylated polypeptide variant, a protease-resistant polypeptide variant, or a hyperglycosylated, protease-resistant polypeptide variant in combination therapy with at least a second therapeutic agent. Suitable additional therapeutic agents include, but are not limited to, nucleoside analogs such as ribavirin and viramidine, L-nucleosides such as levovirin, Type II interferon receptor agonists (e.g., IFN-γ), TNF antagonists, thymosin-α, SAPK inhibitors (e.g., pirfenidone or pirfenidone analogs), amantidine, and the like. In connection with combination therapies for the treatment of HCV infection, suitable additional therapeutic agents include, but are not limited to, nucleoside analogs such as ribavirin, levovirin, and virarnidine, Type II interferon receptor agonists (e.g., IFN-γ), TNF antagonists, NS3 inhibitors, NS5B inhibitors, alpha-glucosidase inhibitors, thymosin-α, SAPK inhibitors (e.g., pirfenidone or pirfenidone analogs), amantidine, and the like.

[0899] As non-limiting examples, any of the above-described treatment methods featuring therapy with an effective amount of a subject synthetic Type I interferon receptor polypeptide agonist, a hyperglycosylated polypeptide variant, a protease-resistant polypeptide variant, or a hyperglycosylated, protease-resistant polypeptide variant for the treatment of viral infection, e.g. HCV infection, in a patient can be modified to include co-administration to the patient of an amount of IFN-γ effective to augment the anti-viral effect of the synthetic Type I interferon receptor polypeptide agonist therapy, for the desired treatment duration.

[0900] As non-limiting examples, any of the above-described treatment methods featuring therapy with an effective amount of a subject synthetic Type I interferon receptor polypeptide agonist, a hyperglycosylated polypeptide variant, a protease-resistant polypeptide variant, or a hyperglycosylated, protease-resistant polypeptide variant for the treatment of viral infection, e.g. HCV infection, in a patient can be modified to include co-administration to the patient of an amount of a SAPK inhibitor (e.g., pirfenidone or a pirfenidone analog) effective to augment the anti-viral effect of the synthetic Type I interferon receptor polypeptide agonist therapy, for the desired treatment duration.

[0901] As non-limiting examples, any of the above-described treatment methods featuring therapy with an effective amount of a subject synthetic Type I interferon receptor polypeptide agonist, a hyperglycosylated polypeptide variant, a protease-resistant polypeptide variant, or a hyperglycosylated, protease-resistant polypeptide variant for the treatment of viral infection, e.g. HCV infection, in a patient can be modified to include co-administration to the patient of an amount of a nucleoside analog effective to augment the anti-viral effect of the synthetic Type I interferon receptor polypeptide agonist therapy, for the desired treatment duration.

[0902] As non-limiting examples, any of the above-described treatment methods featuring therapy with an effective amount of a subject synthetic Type I interferon receptor polypeptide agonist, a hyperglycosylated polypeptide variant, a protease-resistant polypeptide variant, or a hyperglycosylated, protease-resistant polypeptide variant for the treatment of viral infection, e.g. HCV infection, in a patient can be modified to include co-administration to the patient of an amount of ribavirin effective to augment the anti-viral effect of the synthetic Type I interferon receptor polypeptide agonist therapy, for the desired treatment duration.

[0903] As non-limiting examples, any of the above-described treatment methods featuring therapy with an effective amount of a subject synthetic Type I interferon receptor polypeptide agonist, a hyperglycosylated polypeptide variant, a protease-resistant polypeptide variant, or a hyperglycosylated, protease-resistant polypeptide variant for the treatment of viral infection, e.g. HCV infection, in a patient can be modified to include co-administration to the patient of an amount of an L-nucleoside (e.g., levovirin) effective to augment the anti-viral effect of the synthetic Type I interferon receptor polypeptide agonist therapy, for the desired treatment duration.

[0904] As non-limiting examples, any of the above-described treatment methods featuring therapy with an effective amount of a subject synthetic Type I interferon receptor polypeptide agonist, a hyperglycosylated polypeptide variant, a protease-resistant polypeptide variant, or a hyperglycosylated, protease-resistant polypeptide variant for the treatment of viral infection, e.g. HCV infection, in a patient can be modified to include co-administration to the patient of an amount of viramidine effective to augment the anti-viral effect of the synthetic Type I interferon receptor polypeptide agonist therapy, for the desired treatment duration.

[0905] As non-limiting examples, any of the above-described treatment methods featuring therapy with an effective amount of a subject synthetic Type I interferon receptor polypeptide agonist, a hyperglycosylated polypeptide variant, a protease-resistant polypeptide variant, or a hyperglycosylated, protease-resistant polypeptide variant for the treatment of viral infection, e.g. HCV infection, in a patient can be modified to include co-administration to the patient of an amount of a TNF antagonist (e.g. etanercept, infliximab or adalimumab) effective to augment the anti-viral effect of the synthetic Type I interferon receptor polypeptide agonist therapy, for the desired treatment duration.

[0906] As non-limiting examples, any of the above-described treatment methods featuring therapy with an effective amount of a subject synthetic Type I interferon receptor polypeptide agonist, a hyperglycosylated polypeptide variant, a protease-resistant polypeptide variant, or a hyperglycosylated, protease-resistant polypeptide variant for the treatment of viral infection, e.g. HCV infection, in a patient can be modified to include co-administration to the patient of an amount of thymosin-α effective to augment the anti-viral effect of the synthetic Type I interferon receptor polypeptide agonist therapy, for the desired treatment duration.

[0907] As non-limiting examples, any of the above-described treatment methods featuring therapy with an effective amount of a subject synthetic Type I interferon receptor polypeptide agonist, a hyperglycosylated polypeptide variant, a protease-resistant polypeptide variant, or a hyperglycosylated, protease-resistant polypeptide variant for the treatment of an HCV infection in a patient can be modified to include co-administration to the patient of an amount of an NS3 inhibitor effective to augment the anti-viral effect of the synthetic Type I interferon receptor polypeptide agonist therapy, for the desired treatment duration.

[0908] As non-limiting examples, any of the above-described treatment methods featuring therapy with an effective amount of a subject synthetic Type I interferon receptor polypeptide agonist, a hyperglycosylated polypeptide variant, a protease-resistant polypeptide variant, or a hyperglycosylated, protease-resistant polypeptide variant for the treatment of an HCV infection in a patient can be modified to include co-administration to the patient of an amount of an NS5B inhibitor effective to augment the anti-viral effect of the synthetic Type I interferon receptor polypeptide agonist therapy, for the desired treatment duration.

[0909] As non-limiting examples, any of the above-described treatment methods featuring therapy with an effective amount of a subject synthetic Type I interferon receptor polypeptide agonist, a hyperglycosylated polypeptide variant, a protease-resistant polypeptide variant, or a hyperglycosylated, protease-resistant polypeptide variant for the treatment of an HCV infection in a patient can be modified to include co-administration to the patient of an amount of an alpha-glucosidase inhibitor effective to augment the anti-viral effect of the synthetic Type I interferon receptor polypeptide agonist therapy, for the desired treatment duration.

[0910] As non-limiting examples, any of the above-described treatment methods featuring therapy with an effective amount of a subject synthetic Type I interferon receptor polypeptide agonist, a hyperglycosylated polypeptide variant, a protease-resistant polypeptide variant, or a hyperglycosylated, protease-resistant polypeptide variant for the treatment of viral infection (e.g., HCV infection) in a patient can be modified to include co-administration to the patient of an amount of IFN-γ and an amount of a SAPK inhibitor (e.g., pirfenidone or a pirfenidone analog) effective to augment the anti-viral effect of the synthetic Type I interferon receptor polypeptide agonist therapy, for the desired treatment duration.

[0911] As non-limiting examples, any of the above-described treatment methods featuring therapy with an effective amount of a subject synthetic Type I interferon receptor polypeptide agonist, a hyperglycosylated polypeptide variant, a protease-resistant polypeptide variant, or a hyperglycosylated, protease-resistant polypeptide variant for the treatment of viral infection (e.g., HCV infection) in a patient can be modified to include co-administration to the patient of an amount of IFN-γ and an amount of a nucleoside analog effective to augment the anti-viral effect of the synthetic Type I interferon receptor polypeptide agonist therapy, for the desired treatment duration.

[0912] As non-limiting examples, any of the above-described treatment methods featuring therapy with an effective amount of a subject synthetic Type I interferon receptor polypeptide agonist, a hyperglycosylated polypeptide variant, a protease-resistant polypeptide variant, or a hyperglycosylated, protease-resistant polypeptide variant for the treatment of viral infection (e.g., HCV infection) in a patient can be modified to include co-administration to the patient of an amount of IFN-γ and an amount of ribavirin effective to augment the anti-viral effect of the synthetic Type I interferon receptor polypeptide agonist therapy, for the desired treatment duration.

[0913] As non-limiting examples, any of the above-described treatment methods featuring therapy with an effective amount of a subject synthetic Type I interferon receptor polypeptide agonist, a hyperglycosylated polypeptide variant, a protease-resistant polypeptide variant, or a hyperglycosylated, protease-resistant polypeptide variant for the treatment of viral infection (e.g., HCV infection) in a patient can be modified to include co-administration to the patient of an amount of IFN-γ and an amount of an L-nucleoside (e.g., levovirin) effective to augment the anti-viral effect of the synthetic Type I interferon receptor polypeptide agonist therapy, for the desired treatment duration.

[0914] As non-limiting examples, any of the above-described treatment methods featuring therapy with an effective amount of a subject synthetic Type I interferon receptor polypeptide agonist, a hyperglycosylated polypeptide variant, a protease-resistant polypeptide variant, or a hyperglycosylated, protease-resistant polypeptide variant for the treatment of viral infection (e.g., HCV infection) in a patient can be modified to include co-administration to the patient of an amount of IFN-γ and an amount of viramidine effective to augment the anti-viral effect of the synthetic Type I interferon receptor polypeptide agonist therapy, for the desired treatment duration.

[0915] As non-limiting examples, any of the above-described treatment methods featuring therapy with an effective amount of a subject synthetic Type I interferon receptor polypeptide agonist, a hyperglycosylated polypeptide variant, a protease-resistant polypeptide variant, or a hyperglycosylated, protease-resistant polypeptide variant for the treatment of viral infection (e.g., HCV infection) in a patient can be modified to include co-administration to the patient of an amount of IFN-γ and an amount of a TNF antagonist (e.g., etanercept, infliximab, or adalimumab) effective to augment the anti-viral effect of the synthetic Type I interferon receptor polypeptide agonist therapy, for the desired treatment duration.

[0916] As non-limiting examples, any of the above-described treatment methods featuring therapy with an effective amount of a subject synthetic Type I interferon receptor polypeptide agonist, a hyperglycosylated polypeptide variant, a protease-resistant polypeptide variant, or a hyperglycosylated, protease-resistant polypeptide variant for the treatment of viral infection (e.g., HCV infection) in a patient can be modified to include co-administration to the patient of an amount of IFN-γ and an amount of thymosin-α effective to augment the anti-viral effect of the synthetic Type I interferon receptor polypeptide agonist therapy, for the desired treatment duration.

[0917] As non-limiting examples, any of the above-described treatment methods featuring therapy with an effective amount of a subject synthetic Type I interferon receptor polypeptide agonist, a hyperglycosylated polypeptide variant, a protease-resistant polypeptide variant, or a hyperglycosylated, protease-resistant polypeptide variant for the treatment of an HCV infection in a patient can be modified to include co-administration to the patient of an amount of IFN-γ and an amount of an NS3 inhibitor effective to augment the anti-viral effect of the synthetic Type I interferon receptor polypeptide agonist therapy, for the desired treatment duration.

[0918] As non-limiting examples, any of the above-described treatment methods featuring therapy with an effective amount of a subject synthetic Type I interferon receptor polypeptide agonist, a hyperglycosylated polypeptide variant, a protease-resistant polypeptide variant, or a hyperglycosylated, protease-resistant polypeptide variant for the treatment of an HCV infection in a patient can be modified to include co-administration to the patient of an amount of IFN-γ and an amount of an NS5B inhibitor effective to augment the anti-viral effect of the synthetic Type I interferon receptor polypeptide agonist therapy, for the desired treatment duration.

[0919] As non-limiting examples, any of the above-described treatment methods featuring therapy with an effective amount of a subject synthetic Type I interferon receptor polypeptide agonist, a hyperglycosylated polypeptide variant, a protease-resistant polypeptide variant, or a hyperglycosylated, protease-resistant polypeptide variant for the treatment of an HCV infection in a patient can be modified to include co-administration to the patient of an amount of IFN-γ and an amount of an alpha-glucosidase inhibitor effective to augment the anti-viral effect of the synthetic Type I interferon receptor polypeptide agonist therapy, for the desired treatment duration.

[0920] As non-limiting examples, any of the above-described treatment methods featuring therapy with an effective amount of a subject synthetic Type I interferon receptor polypeptide agonist, a hyperglycosylated polypeptide variant, a protease-resistant polypeptide variant, or a hyperglycosylated, protease-resistant polypeptide variant for the treatment of viral infection (e.g., HCV infection) in a patient can be modified to include co-administration to the patient of an amount of a nucleoside analog (e.g., ribavirin, viramidine, or an L-nucleoside such as levovirin) and an amount of IFN-γ effective to augment the anti-viral effect of the synthetic Type I interferon receptor polypeptide agonist therapy, for the desired treatment duration.

[0921] As non-limiting examples, any of the above-described treatment methods featuring therapy with an effective amount of a subject synthetic Type I interferon receptor polypeptide agonist, a hyperglycosylated polypeptide variant, a protease-resistant polypeptide variant, or a hyperglycosylated, protease-resistant polypeptide variant for the treatment of viral infection (e.g., HCV infection) in a patient can be modified to include co-administration to the patient of an amount of a nucleoside analog (e.g., ribavirin, viramidine, or an L-nucleoside such as levovirin) and an amount of TNF antagonist (e.g., etanercept, infliximab, or adalimumab) effective to augment the anti-viral effect of the synthetic Type I interferon receptor polypeptide agonist therapy, for the desired treatment duration.

[0922] As non-limiting examples, any of the above-described treatment methods featuring therapy with an effective amount of a subject synthetic Type I interferon receptor polypeptide agonist, a hyperglycosylated polypeptide variant, a protease-resistant polypeptide variant, or a hyperglycosylated, protease-resistant polypeptide variant for the treatment of viral infection (e.g., HCV infection) in a patient can be modified to include co-administration to the patient of an amount of a nucleoside analog (e.g., ribavirin, viramidine, or an L-nucleoside such as levovirin) and an amount of thymosin-α effective to augment the anti-viral effect of the synthetic Type I interferon receptor polypeptide agonist therapy, for the desired treatment duration.

[0923] As non-limiting examples, any of the above-described treatment methods featuring therapy with an effective amount of a subject synthetic Type I interferon receptor polypeptide agonist, a hyperglycosylated polypeptide variant, a protease-resistant polypeptide variant, or a hyperglycosylated, protease-resistant polypeptide variant for the treatment of viral infection (e.g., HCV infection) in a patient can be modified to include co-administration to the patient of an amount of a nucleoside analog (e.g., ribavirin, viramidine, or an L-nucleoside such as levovirin) and an amount of a SAPK inhibitor (e.g., pirfenidone or a pirfenidone analog) effective to augment the anti-viral effect of the synthetic Type I interferon receptor polypeptide agonist therapy, for the desired treatment duration.

[0924] As non-limiting examples, any of the above-described treatment methods featuring therapy with an effective amount of a subject synthetic Type I interferon receptor polypeptide agonist, a hyperglycosylated polypeptide variant, a protease-resistant polypeptide variant, or a hyperglycosylated, protease-resistant polypeptide variant for the treatment of an HCV infection in a patient can be modified to include co-administration to the patient of an amount of a nucleoside analog (e.g., ribavirin, viramidine, or an L-nucleoside such as levovirin) and an amount of an NS3 inhibitor effective to augment the anti-viral effect of the synthetic Type I interferon receptor polypeptide agonist therapy, for the desired treatment duration.

[0925] As non-limiting examples, any of the above-described treatment methods featuring therapy with an effective amount of a subject synthetic Type I interferon receptor polypeptide agonist, a hyperglycosylated polypeptide variant, a protease-resistant polypeptide variant, or a hyperglycosylated, protease-resistant polypeptide variant for the treatment of an HCV infection in a patient can be modified to include co-administration to the patient of an amount of a nucleoside analog (e.g., ribavirin, viramidine, or an L-nucleoside such as levovirin) and an amount of an NS5B inhibitor effective to augment the anti-viral effect of the synthetic Type I interferon receptor polypeptide agonist therapy, for the desired treatment duration.

[0926] As non-limiting examples, any of the above-described treatment methods featuring therapy with an effective amount of a subject synthetic Type I interferon receptor polypeptide agonist, a hyperglycosylated polypeptide variant, a protease-resistant polypeptide variant, or a hyperglycosylated, protease-resistant polypeptide variant for the treatment of an HCV infection in a patient can be modified to include co-administration to the patient of an amount of a nucleoside analog (e.g., ribavirin, viramidine, or an L-nucleoside such as levovirin) and an amount of a TNF antagonist (e.g., etanercept, infliximab, or adalimumab) effective to augment the anti-viral effect of the synthetic Type I interferon receptor polypeptide agonist therapy, for the desired treatment duration.

[0927] As non-limiting examples, any of the above-described treatment methods featuring therapy with an effective amount of a subject synthetic Type I interferon receptor polypeptide agonist, a hyperglycosylated polypeptide variant, a protease-resistant polypeptide variant, or a hyperglycosylated, protease-resistant polypeptide variant for the treatment of an HCV infection in a patient can be modified to include co-administration to the patient of an amount of an NS3 inhibitor and an amount of a TNF antagonist (e.g. etanercept, infliximab, or adalimumab) effective to augment the anti-viral effect of the synthetic Type I interferon receptor polypeptide agonist therapy, for the desired treatment duration.

[0928] As non-limiting examples, any of the above-described treatment methods featuring therapy with an effective amount of a subject synthetic Type I interferon receptor polypeptide agonist, a hyperglycosylated polypeptide variant, a protease-resistant polypeptide variant, or a hyperglycosylated, protease-resistant polypeptide variant for the treatment of an HCV infection in a patient can be modified to include co-administration to the patient of an amount of an NS5B inhibitor and an amount of a TNF antagonist (e.g., etanercept, infliximab, or adalimumab) effective to augment the anti-viral effect of the synthetic Type I interferon receptor polypeptide agonist therapy, for the desired treatment duration.

[0929] As non-limiting examples, any of the above-described treatment methods featuring therapy with an effective amount of a subject synthetic Type I interferon receptor polypeptide agonist, a hyperglycosylated polypeptide variant, a protease-resistant polypeptide variant, or a hyperglycosylated, protease-resistant polypeptide variant for the treatment of an HCV infection in a patient can be modified to include co-administration to the patient of an amount of an alpha-glucosidase inhibitor and an amount of a TNF antagonist (e.g., etanercept, infliximab, or adalimumab) effective to augment the anti-viral effect of the synthetic Type I interferon receptor polypeptide agonist therapy, for the desired treatment duration.

[0930] As non-limiting examples, any of the above-described treatment methods featuring therapy with an effective amount of a subject synthetic Type I interferon receptor polypeptide agonist, a hyperglycosylated polypeptide variant, a protease-resistant polypeptide variant, or a hyperglycosylated, protease-resistant polypeptide variant for the treatment of an HCV infection in a patient can be modified to include co-administration to the patient of an amount of a SAPK inhibitor (e.g., pirfenidone or a pirfendione analog) and an amount of a TNF antagonist (e.g., etanercept, infliximab, or adalimumab) effective to augment the anti-viral effect of the synthetic Type I interferon receptor polypeptide agonist therapy, for the desired treatment duration.

[0931] As non-limiting examples, any of the above-described treatment methods featuring therapy with an effective amount of a subject synthetic Type I interferon receptor polypeptide agonist, a hyperglycosylated polypeptide variant, a protease-resistant polypeptide variant, or a hyperglycosylated, protease-resistant polypeptide variant for the treatment of an HCV infection in a patient can be modified to include co-administration to the patient of an amount of thymosin-α and an amount of a TNF antagonist (e.g., etanercept, infliximab, or adalimumab) effective to augment the anti-viral effect of the synthetic Type I interferon receptor polypeptide agonist therapy, for the desired treatment duration.

[0932] As non-limiting examples, any of the above-described treatment methods featuring therapy with an effective amount of a subject synthetic Type I interferon receptor polypeptide agonist, a hyperglycosylated polypeptide variant, a protease-resistant polypeptide variant, or a hyperglycosylated, protease-resistant polypeptide variant for the treatment of an HCV infection in a patient can be modified to include co-administration to the patient of an amount of a nucleoside analog (e.g., ribavirin, viramidine, or an L-nucleoside such as levovirin) and an amount of thymosin-α effective to augment the anti-viral effect of the synthetic Type I interferon receptor polypeptide agonist therapy, for the desired treatment duration.

[0933] As non-limiting examples, any of the above-described treatment methods featuring therapy with an effective amount of a subject synthetic Type I interferon receptor polypeptide agonist, a hyperglycosylated polypeptide variant, a protease-resistant polypeptide variant, or a hyperglycosylated, protease-resistant polypeptide variant for the treatment of an HCV infection in a patient can be modified to include co-administration to the patient of an amount of a SAPK inhibitor (e.g., pirfenidone or a pirfenidone analog) and an amount of thymosin-α effective to augment the anti-viral effect of the synthetic Type I interferon receptor polypeptide agonist therapy, for the desired treatment duration.

[0934] As non-limiting examples, any of the above-described treatment methods featuring therapy with an effective amount of a subject synthetic Type I interferon receptor polypeptide agonist, a hyperglycosylated polypeptide variant, a protease-resistant polypeptide variant, or a hyperglycosylated, protease-resistant polypeptide variant for the treatment of an HCV infection in a patient can be modified to include co-administration to the patient of an amount of an NS3 inhibitor and an amount of thymosin-α effective to augment the anti-viral effect of the synthetic Type I interferon receptor polypeptide agonist therapy, for the desired treatment duration.

[0935] As non-limiting examples, any of the above-described treatment methods featuring therapy with an effective amount of a subject synthetic Type I interferon receptor polypeptide agonist, a hyperglycosylated polypeptide variant, a protease-resistant polypeptide variant, or a hyperglycosylated, protease-resistant polypeptide variant for the treatment of an HCV infection in a patient can be modified to include co-administration to the patient of an amount of an NS5B inhibitor and an amount of thymosin-α effective to augment the anti-viral effect of the synthetic Type I interferon receptor polypeptide agonist therapy, for the desired treatment duration.

[0936] As non-limiting examples, any of the above-described treatment methods featuring therapy with an effective amount of a subject synthetic Type I interferon receptor polypeptide agonist, a hyperglycosylated polypeptide variant, a protease-resistant polypeptide variant, or a hyperglycosylated, protease-resistant polypeptide variant for the treatment of an HCV infection in a patient can be modified to include co-administration to the patient of an amount of an alpha-glucosidase inhibitor and an amount of thymosin-α effective to augment the anti-viral effect of the synthetic Type I interferon receptor polypeptide agonist therapy, for the desired treatment duration.

[0937] As non-limiting examples, any of the above-described treatment methods featuring therapy with an effective amount of a subject synthetic Type I interferon receptor polypeptide agonist, a hyperglycosylated polypeptide variant, a protease-resistant polypeptide variant, or a hyperglycosylated, protease-resistant polypeptide variant for the treatment of an HCV infection in a patient can be modified to include co-administration to the patient of an amount of a nucleoside analog (e.g., ribavirin, viramidine, or an L-nucleoside such as levovirin) and an amount of a SAPK inhibitor (e.g., pirfenidone or a pirfenidone analog) effective to augment the anti-viral effect of the synthetic Type I interferon receptor polypeptide agonist therapy, for the desired treatment duration.

[0938] As non-limiting examples, any of the above-described treatment methods featuring therapy with an effective amount of a subject synthetic Type I interferon receptor polypeptide agonist, a hyperglycosylated polypeptide variant, a protease-resistant polypeptide variant, or a hyperglycosylated, protease-resistant polypeptide variant for the treatment of an HCV infection in a patient can be modified to include co-administration to the patient of an amount of an NS3 inhibitor and an amount of a SAPK inhibitor (e.g., pirfenidone or a pirfenidone analog) effective to augment the anti-viral effect of the synthetic Type I interferon receptor polypeptide agonist therapy, for the desired treatment duration.

[0939] As non-limiting examples, any of the above-described treatment methods featuring therapy with an effective amount of a subject synthetic Type I interferon receptor polypeptide agonist, a hyperglycosylated polypeptide variant, a protease-resistant polypeptide variant, or a hyperglycosylated, protease-resistant polypeptide variant for the treatment of an HCV infection in a patient can be modified to include co-administration to the patient of an amount of an NS5B inhibitor and an amount of a SAPK inhibitor (e.g., pirfenidone or a pirfenidone analog) effective to augment the anti-viral effect of the synthetic Type I interferon receptor polypeptide agonist therapy, for the desired treatment duration.

[0940] As non-limiting examples, any of the above-described treatment methods featuring therapy with an effective amount of a subject synthetic Type I interferon receptor polypeptide agonist, a hyperglycosylated polypeptide variant, a protease-resistant polypeptide variant, or a hyperglycosylated, protease-resistant polypeptide variant for the treatment of an HCV infection in a patient can be modified to include co-administration to the patient of an amount of an alpha-glucosidase inhibitor and an amount of a SAPK inhibitor (e.g., pirfenidone or a pirfenidone analog) effective to augment the anti-viral effect of the synthetic Type I interferon receptor polypeptide agonist therapy, for the desired treatment duration.

[0941] As non-limiting examples, any of the above-described treatment methods featuring therapy with an effective amount of a subject synthetic Type I interferon receptor polypeptide agonist, a hyperglycosylated polypeptide variant, a protease-resistant polypeptide variant, or a hyperglycosylated, protease-resistant polypeptide variant for the treatment of an HCV infection in a patient can be modified to include co-administration to the patient of an amount of a nucleoside analog (e.g., ribavirin, viramidine, or an L-nucleoside such as levovirin) and an amount of an alpha-glucosidase inhibitor effective to augment the anti-viral effect of the synthetic Type I interferon receptor polypeptide agonist therapy, for the desired treatment duration.

[0942] As non-limiting examples, any of the above-described treatment methods featuring therapy with an effective amount of a subject synthetic Type I interferon receptor polypeptide agonist, a hyperglycosylated polypeptide variant, a protease-resistant polypeptide variant, or a hyperglycosylated, protease-resistant polypeptide variant for the treatment of an HCV infection in a patient can be modified to include co-administration to the patient of an amount of an NS5B inhibitor and an amount of an NS3 inhibitor effective to augment the anti-viral effect of the synthetic Type I interferon receptor polypeptide agonist therapy, for the desired treatment duration.

[0943] As non-limiting examples, any of the above-described treatment methods featuring therapy with an effective amount of a subject synthetic Type I interferon receptor polypeptide agonist, a hyperglycosylated polypeptide variant, a protease-resistant polypeptide variant, or a hyperglycosylated, protease-resistant polypeptide variant for the treatment of an HCV infection in a patient can be modified to include co-administration to the patient of an amount of an alpha-glucosidase inhibitor and an amount of an NS3 inhibitor effective to augment the anti-viral effect of the synthetic Type I interferon receptor polypeptide agonist therapy, for the desired treatment duration.

[0944] As non-limiting examples, any of the above-described treatment methods featuring therapy with an effective amount of a subject synthetic Type I interferon receptor polypeptide agonist for the treatment of an HCV infection in a patient can be modified to include co-administration to the patient of an amount of an NS5B inhibitor and an amount of an alpha-glucosidase inhibitor effective to augment the anti-viral effect of the synthetic Type I interferon receptor polypeptide agonist therapy, for the desired treatment duration.

Patient Identification

[0945] In certain embodiments, the specific regimen of drug therapy used in treatment of the HCV patient is selected according to certain disease parameters exhibited by the patient, such as the initial viral load, genotype of the HCV infection in the patient, liver histology and/or stage of liver fibrosis in the patient.

[0946] Thus, in some embodiments, the present invention provides any of the above-described methods for the treatment of HCV infection in which the subject method is modified to treat a treatment failure patient for a duration of 48 weeks.

[0947] In other embodiments, the invention provides any of the above-described methods for HCV in which the subject method is modified to treat a non-responder patient, where the patient receives a 48 week course of therapy.

[0948] In other embodiments, the invention provides any of the above-described methods for the treatment of HCV infection in which the subject method is modified to treat a relapser patient, where the patient receives a 48 week course of therapy.

[0949] In other embodiments, the invention provides any of the above-described methods for the treatment of HCV infection in which the subject method is modified to treat a naïve patient infected with HCV genotype 1, where the patient receives a 48 week course of therapy.

[0950] In other embodiments, the invention provides any of the above-described methods for the treatment of HCV infection in which the subject method is modified to treat a naïve patient infected with HCV genotype 4, where the patient receives a 48 week course of therapy.

[0951] In other embodiments, the invention provides any of the above-described methods for the treatment of HCV infection in which the subject method is modified to treat a naïve patient infected with HCV genotype 1, where the patient has a high viral load (HVL), where “HVL” refers to an HCV viral load of greater than 2×10⁶ HCV genome copies per mL serum, and where the patient receives a 48 week course of therapy.

[0952] In one embodiment, the invention provides any of the above-described methods for the treatment of an HCV infection, where the subject method is modified to include the steps of (1) identifying a patient having advanced or severe stage liver fibrosis as measured by a Knodell score of 3 or 4 and then (2) administering to the patient the drug therapy of the subject method for a time period of about 24 weeks to about 60 weeks, or about 30 weeks to about one year, or about 36 weeks to about 50 weeks, or about 40 weeks to about 48 weeks, or at least about 24 weeks, or at least about 30 weeks, or at least about 36 weeks, or at least about 40 weeks, or at least about 48 weeks, or at least about 60 weeks.

[0953] In another embodiment, the invention provides any of the above-described methods for the treatment of an HCV infection, where the subject method is modified to include the steps of (1) identifying a patient having advanced or severe stage liver fibrosis as measured by a Knodell score of 3 or 4 and then (2) administering to the patient the drug therapy of the subject method for a time period of about 40 weeks to about 50 weeks, or about 48 weeks.

[0954] In another embodiment, the invention provides any of the above-described methods for the treatment of an HCV infection, where the subject method is modified to include the steps of (1) identifying a patient having an HCV genotype 1 infection and an initial viral load of greater than 2 million viral genome copies per ml of patient serum and then (2) administering to the patient the drug therapy of the subject method for a time period of about 24 weeks to about 60 weeks, or about 30 weeks to about one year, or about 36 weeks to about 50 weeks, or about 40 weeks to about 48 weeks, or at least about 24 weeks, or at least about 30 weeks, or at least about 36 weeks, or at least about 40 weeks, or at least about 48 weeks, or at least about 60 weeks.

[0955] In another embodiment, the invention provides any of the above-described methods for the treatment of an HCV infection, where the subject method is modified to include the steps of (1) identifying a patient having an HCV genotype 1 infection and an initial viral load of greater than 2 million viral genome copies per ml of patient serum and then (2) administering to the patient the drug therapy of the subject method for a time period of about 40 weeks to about 50 weeks, or about 48 weeks.

[0956] In another embodiment, the invention provides any of the above-described methods for the treatment of an HCV infection, where the subject method is modified to include the steps of (1) identifying a patient having an HCV genotype 1 infection and an initial viral load of greater than 2 million viral genome copies per ml of patient serum and no or early stage liver fibrosis as measured by a Knodell score of 0, 1, or 2 and then (2) administering to the patient the drug therapy of the subject method for a time period of about 24 weeks to about 60 weeks, or about 30 weeks to about one year, or about 36 weeks to about 50 weeks, or about 40 weeks to about 48 weeks, or at least about 24 weeks, or at least about 30 weeks, or at least about 36 weeks, or at least about 40 weeks, or at least about 48 weeks, or at least about 60 weeks.

[0957] In another embodiment, the invention provides any of the above-described methods for the treatment of an HCV infection, where the subject method is modified to include the steps of (1) identifying a patient having an HCV genotype 1 infection and an initial viral load of greater than 2 million viral genome copies per ml of patient serum and no or early stage liver fibrosis as measured by a Knodell score of 0, 1, or 2 and then (2) administering to the patient the drug therapy of the subject method for a time period of about 40 weeks to about 50 weeks, or about 48 weeks.

[0958] In another embodiment, the invention provides any of the above-described methods for the treatment of an HCV infection, where the subject method is modified to include the steps of (1) identifying a patient having an HCV genotype 1 infection and an initial viral load of less than or equal to 2 million viral genome copies per ml of patient serum and then (2) administering to the patient the drug therapy of the subject method for a time period of about 20 weeks to about 50 weeks, or about 24 weeks to about 48 weeks, or about 30 weeks to about 40 weeks, or up to about 20 weeks, or up to about 24 weeks, or up to about 30 weeks, or up to about 36 weeks, or up to about 48 weeks.

[0959] In another embodiment, the invention provides any of the above-described methods for the treatment of an HCV infection, where the subject method is modified to include the steps of (1) identifying a patient having an HCV genotype 1 infection and an initial viral load of less than or equal to 2 million viral genome copies per ml of patient serum and then (2) administering to the patient the drug therapy of the subject method for a time period of about 20 weeks to about 24 weeks.

[0960] In another embodiment, the invention provides any of the above-described methods for the treatment of an HCV infection, where the subject method is modified to include the steps of (1) identifying a patient having an HCV genotype 1 infection and an initial viral load of less than or equal to 2 million viral genome copies per ml of patient serum and then (2) administering to the patient the drug therapy of the subject method for a time period of about 24 weeks to about 48 weeks.

[0961] In another embodiment, the invention provides any of the above-described methods for the treatment of an HCV infection, where the subject method is modified to include the steps of (1) identifying a patient having an HCV genotype 2 or 3 infection and then (2) administering to the patient the drug therapy of the subject method for a time period of about 24 weeks to about 60 weeks, or about 30 weeks to about one year, or about 36 weeks to about 50 weeks, or about 40 weeks to about 48 weeks, or at least about 24 weeks, or at least about 30 weeks, or at least about 36 weeks, or at least about 40 weeks, or at least about 48 weeks, or at least about 60 weeks.

[0962] In another embodiment, the invention provides any of the above-described methods for the treatment of an HCV infection, where the subject method is modified to include the steps of (1) identifying a patient having an HCV genotype 2 or 3 infection and then (2) administering to the patient the drug therapy of the subject method for a time period of about 20 weeks to about 50 weeks, or about 24 weeks to about 48 weeks, or about 30 weeks to about 40 weeks, or up to about 20 weeks, or up to about 24 weeks, or up to about 30 weeks, or up to about 36 weeks, or up to about 48 weeks.

[0963] In another embodiment, the invention provides any of the above-described methods for the treatment of an HCV infection, where the subject method is modified to include the steps of (1) identifying a patient having an HCV genotype 2 or 3 infection and then (2) administering to the patient the drug therapy of the subject method for a time period of about 20 weeks to about 24 weeks.

[0964] In another embodiment, the invention provides any of the above-described methods for the treatment of an HCV infection, where the subject method is modified to include the steps of (1) identifying a patient having an HCV genotype 2 or 3 infection and then (2) administering to the patient the drug therapy of the subject method for a time period of at least about 24 weeks.

[0965] In another embodiment, the invention provides any of the above-described methods for the treatment of an HCV infection, where the subject method is modified to include the steps of (1) identifying a patient having an HCV genotype 1 or 4 infection and then (2) administering to the patient the drug therapy of the subject method for a time period of about 24 weeks to about 60 weeks, or about 30 weeks to about one year, or about 36 weeks to about 50 weeks, or about 40 weeks to about 48 weeks, or at least about 24 weeks, or at least about 30 weeks, or at least about 36 weeks, or at least about 40 weeks, or at least about 48 weeks, or at least about 60 weeks.

[0966] In another embodiment, the invention provides any of the above-described methods for the treatment of an HCV infection, where the subject method is modified to include the steps of (1) identifying a patient having an HCV infection characterized by any of HCV genotypes 5, 6, 7, 8 and 9 and then (2) administering to the patient the drug therapy of the subject method for a time period of about 20 weeks to about 50 weeks.

[0967] In another embodiment, the invention provides any of the above-described methods for the treatment of an HCV infection, where the subject method is modified to include the steps of (1) identifying a patient having an HCV infection characterized by any of HCV genotypes 5, 6, 7, 8 and 9 and then (2) administering to the patient the drug therapy of the subject method for a time period of at least about 24 weeks and up to about 48 weeks.

Type II Interferon Receptor Agonists

[0968] As used herein, the term “Type II interferon receptor agonist” includes any naturally occurring or non-naturally-occurring ligand of a human Type II interferon receptor that binds to and causes signal transduction via the receptor. Type II interferon receptor agonists include interferons, including naturally-occurring interferons, modified interferons, synthetic interferons, pegylated interferons, fusion proteins comprising an interferon and a heterologous protein, shuffled interferons; antibody specific for an interferon receptor; non-peptide chemical agonists; and the like.

[0969] A specific example of a Type II interferon receptor agonist is IFN-gamma and variants thereof. While the present invention exemplifies use of an IFN-gamma polypeptide, it will be readily apparent that any Type II interferon receptor agonist can be used in a subject method.

SAPK Inhibitors

[0970] SAPK inhibitors suitable for use in a subject treatment method specifically include pirfenidone and pirfenidone analogs; and also specifically include any compound of Formula I as set forth in U.S. Patent Publication No. 20030149041.

[0971] Additional SAPK inhibitors suitable for use herein include agents that inhibit enzymatic activity of a SAPK by at least about 10%, at least about 20%, at least about 25%, at least about 30%, at least about 35%, at least about 40%, at least about 50%, at least about 60%, at least about 70%, at least about 80%, or at least about 90%, or more, when compared with the enzymatic activity of the SAPK in the absence of the SAPK inhibitor.

[0972] The signal transduction pathways that use mitogen-activated protein kinases (MAPK) have an important role in a variety of cellular responses, including growth, stress-induced gene expression, and compensation for alterations in the environment. The SAPK group of MAPKs includes the c-Jun N-terminal Kinase (JNK) and p38 kinases. The p38 group of MAPK include at least four members, designated p38 or p38α, p38β, p38γ, and p38δ. The amino acid sequences of p38α, p38β, and p38γ from various species are known. For example, the amino acid sequences of human p38α, p38α, and p38γ are found under the following GenBank Accession Nos.: 1) Q16539, NP_{—}620583, and NP_{—}001306 provide amino acid sequences of human p38α polypeptides; 2) NP_{—}620478, NP_{—}002742, and Q15759 provide amino acid sequences of human p38β polypeptides; and 3) NP_{—}002960, P53778, and JC5252 provide amino acid sequences of human p38γ polypeptides.

[0973] In some embodiments, a suitable SAPK inhibitor is an agent that inhibits enzymatic activity of p38α, p38β, and p38γ. In other embodiments, a suitable SAPK inhibitor is an agent that preferentially inhibits the enzymatic activity of p38α and p38β, i.e., the agent is a stronger inhibitor of the enzymatic activity of p38α and p38β than that of p38γ, e.g., the agent's IC50 against p38α and p38β is at least about two-fold lower, or about five-fold lower, or about ten-fold lower, or more, below the agent's IC50 against p38γ.

[0974] In other embodiments, a suitable SAPK inhibitor is an agent that preferentially inhibits p38γ, i.e., the agent is a stronger inhibitor of the enzymatic activity of p38γ than that of p38α and p38β, e.g., the agent's IC50 against p38γ is at least about two-fold lower, or about five-fold lower, or about ten-fold lower, or more, below the agent's IC50 against p38α and p38β.

[0975] In some embodiments, a SAPK inhibitor is a competitive inhibitor of a SAPK, e.g., a p38α, a p38β, or a p38γ. In some of these embodiments, a SAPK inhibitor is one that competes for adenosine triphosphate (ATP) for binding to the ATP binding site of p38α, p38β, or p38γ.

[0976] In addition, stress-activated protein kinase (SAPK) inhibitors that are suitable for use in a subject combination therapy include any 2-alkyl imidazole as disclosed in U.S. Pat. No. 6,548,520; any of the 1,4,5-substituted imidazole compounds disclosed in U.S. Pat. Nos. 6,489,325; 1,4,5-substituted imidazole compounds disclosed in U.S. Pat. No. 6,569,871; heteroaryl aminophenyl ketone compounds disclosed in Published U.S. Patent Application No. 2003/0073832; pyridyl imidazole compounds disclosed in U.S. Pat. No. 6,288,089; and heteroaryl aminobenzophenones disclosed in U.S. Pat. No. 6,432,962. Also suitable for use are compounds disclosed in U.S. Pat. No. 6,214,854. Also suitable for use are the heterocyclic compounds discussed in WO 102/61426.

[0977] Pirfenidone and pirfenidone analogs, which are specifically included, are described in detail below. As discussed above, compounds of Formula I of U.S. Patent Publication No. 20030149041 are specifically included. Formula I is as follows:

[chemical structure]

[0978] wherein: R¹ is chosen from —H, C₁ to C₂₀ hydrocarbon, aminocarbonylalkyl, alkoxyalkyl, substituted arylalkyl, heteroaryl, heteroarylalkyl, heterocyclylalkyl, and substituted heterocyclylalkyl;

[0979] R² is chosen from halogen, C₁ to C₂₀ hydrocarbon, hydroxy, heteroaryl, substituted heteroaryl, heterocyclyl, substituted heterocyclyl;

[0980] R⁵ is chosen from —H, alkyl and substituted alkyl;

[0981] R⁶ is chosen from a direct bond, alkyl, aryl, substituted aryl and heteroaryl;

[0982] R⁷ is chosen from —H, acyl, alkyl, substituted alkyl, alkoxycarbonyl, amidine, aryl, arylalkyl, heterocyclyl, heteroaryl, substituted heteroaryl, substituted aryloxy, heteroarylsulfonamido, dialkylsulfonamido,

[chemical structure]

[0983] —C(O)NR⁸R⁹, —C(NH)NR⁸R⁹ and —NR⁸R⁹;

[0984] R⁸ is chosen from —H and alkyl;

[0985] R⁹ is chosen from —H, alkyl, substituted alkyl, aryl, heteroaryl, alkylcarbonyl and arylcarbonyl;

[0986] R³ is chosen from a direct bond,

[chemical structure]

[0987] wherein the left hand bond is the point of attachment to the ring and the right band bond is the point of attachment to R⁴;

[0988] R⁴ is chosen from —H, halogen, alkyl, heterocyclyl, alkylamino, aminocarbonyl,

[chemical structure]

[0989] —C(S)NHR¹², —CHR¹³R¹⁴, —C(O)NHR¹⁵, —C(O)(CH₂)₀₋₂R¹⁶, —S(O₂)R¹⁷, —OR¹⁸

[chemical structure]

[0990] wherein R¹⁰ is chosen from —H, —OH, alkyl, cycloalkyl and substituted cycloalkyl; R¹¹ is chosen from —H; —OH, —COOH, aryl, substituted aryl, heteroaryl, substituted heteroaryl, aryl substituted alkyl, cycloalkyl, substituted cycloalkyl, alkoxy, aminocarbonyl, aminocarbonylalkyl,

[chemical structure]

[0991] R¹² is chosen from alkyl and aryl; R¹³ is chosen from —H and aryl; R14 is chosen from aryl, substituted aryl, heteroaryl, substituted alkyl, aryl substituted alkyl and alkoxy substituted alkyl; R¹⁵ is chosen from alkyl, aryl, substituted aryl and substituted alkyl; R¹⁶ is chosen from aryl, substituted aryl, heteroaryl, carboxyl, alkoxy, substituted alkyl, cycloalkyl, substituted cycloalkyl, aminocarbonyl, substituted aminocarbonyl, heterocyclyl and

[chemical structure]

[0992] R¹⁷ is chosen from alkyl and dialkylamino; R¹⁸ is chosen from C₁ to C₂₀ hydrocarbon, substituted C₁ to C₂₀ hydrocarbon and heteroaryl; Y is chosen from —H and lower alkyl, or Y and R¹ taken together with the attached N, may be chosen from heterocyclyl, substituted heterocyclyl, heteroaryl and substituted heteroaryl; wherein at least two of X, X¹ and X² are —N═, and the other is chosen from —C(H)═ and —N═.

[0993] Of particular interest in some embodiments is use of any of the following SAPK inhibitor compounds, or pharmaceutically acceptable salts, or derivatives, or esters, or analogs, thereof:

[chemical structure]

[0994] which compound has the IUPAC designation (4-benzyl-piperidin-1-yl)-(1H-indol-5-yl)-methanone. Also suitable for use are any of the following compounds: (4-benzyl-piperidin-1-yl)-(6-chloro-1H-indol-5-yl)-methanone; (4-chloro-1H-indol-5-yl)-[4-(4-fluoro-benzyl)-piperidin-1-yl]-methanone; (4-benzyl-piperidin-1-yl)-(4-methoxy-1H-inol-5-yl)-methanone; (4-Benzyl-piperidin-1-yl)-{1-[3-(cyclohexylmethyl-amino)-2-hydroxy-propyl]-1H-indol-5-yl}-methanone; (4-Benzyl-piperidin-1-yl)-{1-[2-hydroxy-3-(4-methyl-piperazin-1-yl)-propyl]-1H-indol-5-yl}-methanone; [1-(3-Benzylamino-2-hydroxy-propyl)-1H-indol-5-yl]-(4-benzyl-piperidin-1-yl)-methanone; (4-Benzyl-piperidin-1-yl)-{1-[2-hydroxy-3-(4-methoxy-benzylamino)-propyl]-1H-indol-5-yl}methanone; (4-Benzyl-piperidin-1-yl)-[1-(2-hydroxy-3-propylamino-propyl)-1H-indol-5-yl]-methanone; (4-Benzyl-piperidin-1-yl)-[1-(pyridine-4-carbonyl)-1H-indol-5-yl]-methanone; 1-[5-(4-Benzyl-piperidine-1-carbonyl)-indol-1-yl]-ethanone; 2-[5-(4-Benzyl-piperidine-1-carbonyl)-indol-1-yl]-N-(4-methoxy-benzyl)-acetamide; 5-(4-Benzyl-piperidine-1-carbonyl)-1H-indole-3-carboxylic acid (2-methoxy-ethyl)-amide; 5-(4-Benzyl-piperidine-1-carbonyl)-1H-indole-3-carboxylic acid (2-methylamino-ethyl)-amide; 5-(4-Benzyl-piperidine-1-carbonyl)-1H-indole-3-carboxylic acid (2-amino-ethyl)-amide; [3-(4-Benzyl-piperidine-1-carbonyl)-1H-indol-5-yl]-(4-benzyl-piperidin-1-yl)-methanone; [3-(4-Benzyl-piperidine-1-carbonyl)-1H-indol-6-yl]-(4-benzyl-piperidin-1-yl)-methanone; 5-(4-Benzyl-piperidine-1-carbonyl)-1H-indole-3-carboxylic acid 4-fluoro-benzylamide; 5-(4-Benzyl-piperidine-1-carbonyl)-1H-indole-3-carboxylicacid[2-(3,5-dimethoxy-phenyl)-ethyl]-amide; (4-Benzyl-piperidin-1-yl)-(6-methoxy-1H-indol-5-yl)-methanone; 1-[5-(4-Benzyl-piperidine-1-carbonyl)-1H-indol-3-yl]-2,2,2-trifluoro-ethanone; 5-(4-Benzyl-piperidine-1-carbonyl)-6-methoxy-1H-indole-3-carboxylic acid (2-dimethylamino-ethyl)-amide; 5-(4-Benzyl-piperidine-1-carbonyl)-1H-indole-3-carboxylic acid; 5-(4-Benzyl-piperidine-1-carbonyl)-1H-indole-3-carboxylic acid (2-dimethylamino-ethyl)-amide; (1H-Benzoimidazol-5-yl)-(4-benzyl-piperidin-1-yl)-methanone; (1H-Benzoimidazol-5-yl)-[4-(4-fluoro-benzyl)-piperidin-1-yl]-methanone; (4-Benzyl-piperidin-1-yl)-(3-morpholin-4-ylmethyl-1H-indol-5-yl)-methanone; 1-[6-(4-Benzyl-piperidine-1-carbonyl)-1H-indol-3-yl]-2,2,2-trifluoro-ethanone; (4-Benzyl-piperidin-1-yl)-[1-(pyridine-4-carbonyl)-1H-indol-6-yl]-methanone; (3-Benzyl-8-aza-bicyclo[3.2.1]oct-8-yl)-(6-methoxy-1H-indol-5-yl)-methanone; (3H-Benzoimidazol-5-yl)-(3-benzyl-8-aza-bicyclo[3.2.1]oct-8-yl)-methanone; [3-(4-Fluoro-benzyl)-pyrrolidin-1-yl]-(1H-indol-6-yl)-methanone; (1H-Benzoimidazol-5-yl)-[4-(2,6-difluoro-benzyl)-piperazin-1-yl]-methanone; (1H-Benzoimidazol-5-yl)-[4-(4-methylsulfanyl-benzyl)-piperazin-1-yl]-methanone; (1H-Benzoimidazol-5-yl)-[4-(2,3-difluoro-benzyl)-piperazin-1-yl]-methanone; (1H-Benzoimidazol-5-yl)-[4-(3,5-difluoro-benzyl)-piperazin-1-yl]-methanone; (1H-Benzoimidazol-5-yl)-[4-(3-chloro-benzyl)-piperazin-1-yl]-methanone; 4-[4-(1H-Benzoimidazole-5-carbonyl)-piperazin-1-ylmethyl]-benzoic acid methyl ester; (1H-Benzoimidazol-5-yl)-[4-(4-methoxy-benzyl)-piperazin-1-yl]-methanone; (1H-Benzoimidazol-5-yl)-[4-(4-trifluoromethoxy-benzyl)-piperazin-1-yl]-methanone; (1H-Benzoimidazol-5-yl)-[4-(4-methyl-benzyl)-piperazin-1-yl]-methanone; (1H-Benzoimidazol-5-yl)-[4-(2,4-dichloro-benzoyl)-piperazin-1-yl]-methanone; (1H-Benzoimidazol-5-yl)-[4-(3,4-dichloro-benzoyl)-piperazin-1-yl]-methanone; trans-1-[4-(1H-Benzoimidazole-5-carbonyl)-piperazin-1-yl]-3-(3-trifluoromethyl-phenyl)-propenone; (1H-Benzoimidazol-5-yl)-[4-(4-chloro-benzoyl)-piperazin-1-yl]-methanone; (1H-Benzoimidazol-5-yl)-(4-benzoyl-piperazin-1-yl)-methanone; (1H-Benzoimidazol-5-yl)-[4-(2-trifluoromethyl-benzoyl)-piperazin-1-yl]-methanone; (1H-Benzoimidazol-5-yl)-[4-(4-methoxy-benzoyl)-piperazin-1-yl]-methanone; (1H-Benzoimidazol-5-yl)-[4-(3,4-dichloro-phenyl)-piperazin-1-yl]-methanone; (1H-Benzoimidazol-5-yl)-{4-[(4-chloro-phenyl)-phenyl-methyl]-piperazin-1-yl}-methanone; trans-(1H-Benzoimidazol-5-yl)-[4-(3-phenyl-allyl)-piperazin-1-yl]-methanone; (1H-Benzoimidazol-5-yl)-{4-[bis-(4-fluoro-phenyl)-methyl]-piperazin-1-yl}-methanone; (1H-Benzoimidazol-5-yl)-[4-(4-chloro-benzyl)-piperazin-1-yl]-methanone; (1H-Benzoimidazol-5-yl)-[4-(2-chloro-benzyl)-piperazin-1-yl]-methanone; (1H-Benzoimidazol-5-yl)-[4-(3,4,5-trimethoxy-benzyl)-piperazin-1-yl]-methanone; (1H-Benzoimidazol-5-yl)-[4-(4-diethylamino-benzyl-piperazin-1-yl]-methanone; (1H-Benzoimidazol-5-yl)-(4-biphenyl-4-ylmethyl-piperazin-1-yl)-methanone; (1H-Benzoimidazol-5-yl)-[4-(4-phenoxy-benzyl)-piperazin-1-yl]-methanone; (4-Benzyl-piperidin-1-yl)-(6-methoxy-1H-benzoimidazol-5-yl)-methanone; (4-Benzyl-piperidin-1-yl)-(1-isopropyl-1H-benzoimidazol-5-yl)-methanone; (4-Benzyl-piperidin-1-yl)-(3-isopropyl-3H-benzoimidazol-5-yl)-methanone; (4-Benzyl-piperidin-1-yl)-(1-isopropyl-1H-indol-5-yl)-methanone; [4-(4-Chloro-benzyl)-piperazin-1-yl]-(1-isopropyl-1H-indol-5-yl)-methanone; (1H-Benzotriazol-5-yl)-(4-benzyl-piperidin-1-yl)-methanone; (4-Benzyl-piperidin-1-yl)-(1-isopropyl-1H-benzotriazol-5-yl)-methanone; [4-(4-Chloro-benzyl)-piperidin-1-yl]-(1H-indol-5-yl)-methanone; [4-(3-Chloro-benzyl)-piperidin-1-yl]-(1H-indol-5-yl)-methanone; [4-(2-Chloro-benzyl)-piperidin-1-yl]-(1H-indol-5-yl)-methanone; (4-Benzyl-2-methyl-piperidin-1-yl)-(1H-indol-5-yl)-methanone; (4-Benzyl-piperidin-1-yl)-(4-chloro-1H-indol-5-yl)-methanone; (4-Benzyl-piperidin-1-yl)-[7-chloro-1-(pyridine-3-carbonyl)-1H-indol-6-yl]-methanone; (4-Benzyl-piperidin-1-yl)-(5-chloro-1H-indol-6-yl)-methanone; (4-Benzyl-piperidin-1-yl)-(7-chloro-1H-indol-6-yl)-methanone; 6-(4-Benzyl-piperidine-1-carbonyl)-7-chloro-1-(pyridine-3-carbonyl)-1H-indole-3-carboxylic acid (2-dimethylamino-ethyl)-amide; (4-Benzyl-piperidin-1-yl)-(1-pyridin-4-ylmethyl-1H-indol-5-yl)-methanone; (4-Benzyl-piperidin-1-yl)-[6-methoxy-1-(pyridine-3-carbonyl)-1H-indol-5-yl]-methanone; [5-(4Benzyl-piperidine-1-carbonyl)-indol-1-yl]-acetic acid methyl ester; 1-[5-(4-Benzyl-piperidine-1-carbonyl)-indol-1-yl]-3-isopropylamino-propan-1-one; 1-[5-(4-Benzyl-piperidine-1-carbonyl)-indol-1-yl]-3-piperazin-1-yl-propan-1-one; 3-Benzylamino-1-[5-(4-benzyl-piperidine-1-carbonyl)-indol-1-yl]-propan-1-one; 1-[5-(4-Benzyl-piperidine-1-carbonyl)-indol-1-yl]-3-morpholin-(4-yl-propan-1-one; 2-[5-(4-Benzyl-piperidine-1-carbonyl)-indol-1-yl]-N-propyl-acetamide; (4-Benzyl-piperidin-1-yl)-[1-(2-diethylamino-ethyl)-6-methoxy-1H-indol-5-yl]-methanone; (4-Benzyl-piperidin-1-yl)-[1-(3-diethylamino-propyl)-1H-indol-5-yl]-methanone; (4-Benzyl-piperidin-1-yl)-[1-(2-diethylamino-ethyl)-1H-indol-5-yl]-methanone; (4-Benzyl-piperidin-1-yl)-[6-chloro-1-(3-diethylamino-propyl)-1H-indol-5-yl]-methanone; [1-(2-Diethylamino-ethyl)-1H-indol-5-yl]-[4-(4-fluoro-benzyl)-piperidin-1-yl]-methanone; (4-Benzyl-piperidin-1-yl)-[1-(3-diethylamino-propyl)-6-methoxy-1H-indol-5-yl]-methanone; 5-(4-Benzyl-piperidine-1-carbonyl)-1H-indole-3-carboxylic acid (2-amino-ethyl)-methyl-amide; 5-(4-Benzyl-piperidine-1-carbonyl)-1H-indole-3-carboxylic acid [2-(3,4-dimethoxy-phenyl)-ethyl]-amide; (4-Benzyl-piperidin-1-yl)-(3-diethylaminomethyl-1H-indol-5-yl)-methanone; [4-(4-Fluoro-benzyl)-piperidin-1-yl]-(6-methoxy-1H-indol-5-yl)-methanone; (4-Benzyl-piperidin-1-yl)-(1-pyridin-4-yl-1H-indol-5-yl)-methanone; and 4-(4-Benzyl-piperidin-1-yl)-(4-chloro-2-methyl-1H-indol-5-yl)-methanone; or pharmaceutically acceptable salts, or derivatives, or esters, or analogs, of any of the foregoing compounds.

[0995] Of particular interest in some embodiments is use of any of the following SAPK inhibitor compounds, or pharmaceutically acceptable salts, or derivatives, or esters, or analogs, thereof:

[chemical structure]

[0996] which compound has the IUPAC designation [2-(2-Chloro-phenyl)-quinazolin-4-yl]-pyridin-4-yl-amine. Also suitable for use are any of the following compounds: [2-(2,6-Dichloro-phenyl)-quinazolin-4-yl]-pyridin-4-yl-amine; Pyridin-4-yl-(2-o-tolyl-quinazolin-4-yl)-amine; [2-(2-Bromo-phenyl)-quinazolin-4-yl]-pyridin-4-yl-amine; [2-(2-Fluoro-phenyl)-quinazolin-4-yl]-pyridin-4-yl-amine; [2-(2,6-Difluoro-phenyl)-quinazolin-4-yl]-pyridin-4-yl-amine; (2-Phenyl-quinazolin-4-yl)-pyridin-4-yl-amine; [2-(4-Fluoro-phenyl)-quinazolin-4-yl]-pyridin-4-yl-amine; [2-(4-Methoxy-phenyl)-quinazolin-4-yl]-pyridin-4-yl-amine; [2-(3-Fluoro-phenyl)-quinazolin-4-yl]-pyridin-4-yl-amine; Isopropyl-(2-phenyl-quinazolin-4-yl)-pyridin-4-yl-amine; (4-Methoxy-benzyl)-(2-phenyl-quinazolin-4-yl)-pyridin-4-yl-amine; (2-Phenyl-quinazolin-4-yl)-pyridin-4-ylmethyl-amine; [2-(4-Chloro-phenyl)-quinazolin-4-yl]-pyridin-4-ylmethyl-amine; (2-Phenyl-quinazolin-4-yl)-pyridin-3-yl-amine; (2-Phenyl-quinazolin-4-yl)-pyridin-2-ylmethyl-amine; (2-Phenyl-quinazolin-4-yl)-pyridin-3-ylmethyl-amine; (2-Phenyl-quinazolin-4-yl)-(2-pyridin-2-yl-ethyl)-amine; (2-Phenyl-quinazolin-4-yl)-pyrimidin-4-yl-amine; (2-Phenyl-quinazolin-4-yl)-pyrimidin-2-yl-amine; Phenyl-(2-phenyl-quinazolin-4-yl)-amine; Benzyl-[2-(3-chloro-phenyl)-quinazolin-4-yl]-amine; 3-(2-Phenyl-quinazolin-4-ylamino)-phenol; 2-(2-Phenyl-quinazolin-4-ylamino)-phenol; 4-(2-Phenyl-quinazolin-4-ylamino)-phenol; (1H-Indol-4-yl)-(2-phenyl-quinazolin-4-yl)-amine; (1H-Indol-5-yl)-(2-phenyl-quinazolin-4-yl)-amine; (4-Methoxy-phenyl)-(2-phenyl-quinazolin-4-yl)-amine; (3-Methoxy-phenyl)-(2-phenyl-quinazolin-4-yl)-amine; (2-Methoxy-phenyl)-(2-phenyl-quinazolin-4-yl)-amine; 2-[4-(2-Phenyl-quinazolin-4-ylamino)-phenyl]-ethanol; 3-(2-Phenyl-quinazolin-4-ylamino)-benzonitrile; (2,5-Difluoro-benzyl)-(2-phenyl-quinazolin-4-yl)-amine; [4-(2-Butyl)-phenyl]-(2-phenyl-quinazolin-4-yl)-amine; N,N-Dimethyl-N′-(2-phenyl-quinazolin-4-yl)-benzene-1,4-diamine; [2-(2-Chloro-phenyl)-6,7-dimethoxy-quinazolin-4-yl]-pyridin-4-yl-amine; [2-(2-Fluoro-phenyl)-6-nitro-quinazolin-4-yl]-pyridin-4-yl-amine; 2-(2-Fluoro-phenyl)-N-4-pyridin-4-yl-quinazoline-4,6-diamine; 2-(2-Fluoro-phenyl)-N-4-pyridin-4-yl-quinazoline-4,7-diamine; 2-(2-Fluoro-phenyl)-N-6-(3-methoxy-benzyl)-N-4-pyridin-4-yl-quinazoline-4,6-diamine; 2-(2-Fluoro-phenyl)-N-6-(4-methoxy-benzyl)-N-4-pyridin-4-yl-quinazoline-4,6-diamine; N6-Isobutyl-2-(2-fluoro-phenyl)-N-4-pyridin-4-yl-quinazoline-4,6-diamine; 2-(2-Fluoro-phenyl)-N-6-(4-methylsulfanyl-benzyl)-N-4-pyridin-4-yl-quinazoline-4,6-diamine; 4-(4-Pyridylamino)-2-(4-chlorophenyl)quinazoline; 2-Phenyl-4-(2-pyridylamino)-quinazoline; and [2-(2-Fluoro-phenyl)-pyrido[2,3-d]pyrimidin-4-yl]-pyridin-4-yl-amine; or pharmaceutically acceptable salts, or derivatives, or esters, or analogs, of any of the foregoing compounds.

[0997] A further suitable SAPK inhibitor is BIRB796 (1-(5-tert-butyl-2-p-tolyl-2H-pyrazol-3-yl)-3-[4-(2-morpholin-4-yl-e-thoxy)-naphthalen-1-yl]-urea); see U.S. Pat. No. 6,319,921.

[0998] BIRB796 has the following structure:

[chemical structure]

[0999] Also suitable for use are pharmaceutically active derivatives, analogs, esters, and salts of BIRB796.

[1000] Another suitable SAPK inhibitor is 2(1H)-quinazolinone, as shown below:

[chemical structure]

[1001] Also suitable for use are pharmaceutically active derivatives, analogs, esters, and salts of 2(1H)-quinazolinone.

[1002] Additionally suitable for use is VX-745 (Vertex Pharmaceuticals and Kissei Pharmaceutical Co.) VX-745 has been reported to inhibit several isotypes of p38, including p38-alpha, p38-beta and p38-gamma.

Pirfenidone and Analogs Thereof

[1003] Pirfenidone (5-methyl-1-phenyl-2-(1H)-pyridone) and specific pirfenidone analogs can be used to enhance the methods of treatment for HCV infection disclosed herein.
Pirfenidone

[chemical structure]

[1004] Pirfenidone Analogs [chemical structure]
Descriptions for Substituents R₁, R₂, X

[1005] R1: carbocyclic (saturated and unsaturated), heterocyclic (saturated or unsaturated), alkyls (saturated and unsaturated). Examples include phenyl, benzyl, pyrimidyl, naphthyl, indolyl, pyrrolyl, furyl, thienyl, imidazolyl, cyclohexyl, piperidyl, pyrrolidyl, morpholinyl, cyclohexenyl, butadienyl, and the like.

[1006] R1 can further include substitutions on the carbocyclic or heterocyclic moieties with substituents such as halogen, nitro, amino, hydroxyl, alkoxy, carboxyl, cyano, thio, alkyl, aryl, heteroalkyl, heteroaryl and combinations thereof, for example, 4-nitrophenyl, 3-chlorophenyl, 2,5-dinitrophenyl, 4-methoxyphenyl, 5-methyl-pyrrolyl, 2, 5-dichlorocyclohexyl, guanidinyl-cyclohexenyl and the like.

[1007] R₂: alkyl, carbocylic, aryl, heterocyclic, hydroxyl, alkoxy, carboxyl. Examples include: methyl, ethyl, propyl, isopropyl, phenyl, 4-nitrophenyl, thienyl, hydroxyl, methoxy, carboxy and the like.

[1008] X: may be any number (from 1 to 3) of substituents on the carbocyclic or heterocyclic ring. The substituents can be the same or different. Substituents can include hydrogen, alkyl, heteroalkyl, aryl, heteroaryl, halo, nitro, carboxyl, hydroxyl, cyano, amino, thio, alkylamino, haloaryl and the like.

[1009] The substituents may be optionally further substituted with 1-3 substituents from the group consisting of alkyl, aryl, nitro, alkoxy, hydroxyl and halo groups. Examples include: methyl, 2,3-dimethyl, phenyl, p-tolyl, 4-chlorophenyl, 4-nitrophenyl, 2,5-dichlorophenyl, furyl, thienyl and the like.

[1010] Specific Examples include those shown in Table 10:

TABLE 10

| IA | IIB |
|---|---|
| 5-Methyl-1-(2′-pyridyl)-2-(1H) pyridine, | 6-Methyl-1-phenyl-3-(1H) pyridone, |
| 6-Methyl-1-phenyl-2-(1H) pyridone, | 5-Methyl-1-p-tolyl-3-(1H) pyridone, |
| 5-Methyl-3-phenyl-1-(2′-thienyl)-2-(1H) | 5-Methyl-1-(2′-naphthyl)-3-(1H) pyridone, |
| pyridone, | |
| 5-Methyl-1-(2′-naphthyl)-2-(1H) pyridone, | 5-Methyl-1-phenyl-3-(1H) pyridone, |
| 5-Methyl-1-p-tolyl-2-(1H) pyridone, | 5-Methyl-1-(5′-quinolyl)-3-(1H) pyridone, |
| 5-Methyl-1-(1′naphthyl)-2-(1H) pyridone, | 5-Ethyl-1-phenyl-3-(1H) pyridone, |
| 5-Ethyl-1-phenyl-2-(1H) pyridone, | 5-Methyl-1-(4′-methoxyphenyl)-3-(1H) |
| | pyridone, |
| 5-Methyl-1-(5′-quinolyl)-2-(1H) pyridone, | 4-Methyl-1-phenyl-3-(1H) pyridone, |
| 5-Methyl-1-(4′-quinolyl)-2-(1H) pyridone, | 5-Methyl-1-(3′-pyridyl)-3-(1H) pyridone, |
| 5-Methyl-1-(4′-pyridyl)-2-(1H) pyridone, | 5-Methyl-1-(2′-Thienyl)-3-(1H) pyridone, |
| 3-Methyl-1-phenyl-2-(1H) pyridone, | 5-Methyl-1-(2′-pyridyl)-3-(1H) pyridone, |
| 5-Methyl-1-(4′-methoxyphenyl)-2-(1H) | 5-Methyl-1-(2′-quinolyl)-3-(1H) pyridone, |
| pyridone, | |
| 1-Phenyl-2-(1H) pyridone, | 1-Phenyl-3-(1H) pyridine, |
| 1,3-Diphenyl-2-(1H) pyridone, | 1-(2′-Furyl)-5-methyl-3-(1H) pyridone, |
| 1,3-Diphenyl-5-methyl-2-(1H) pyridone, | 1-(4′-Chlorophenyl)-5-methyl-3-(1H) pyridine. |
| 5-Methyl-1-(3′-trifluoromethylphenyl)-2- | |
| (1H)-pyridone, | |
| 3-Ethyl-1-phenyl-2-(1H) pyridone, | |
| 5-Methyl-1-(3′-pyridyl)-2-(1H) pyridone, | |
| 5-Methyl-1-(3-nitrophenyl)-2-(1H) | |
| pyridone, | |
| 3-(4′-Chlorophenyl)-5-Methyl-1-phenyl-2- | |
| (1H) pyridone, | |
| 5-Methyl-1-(2′-Thienyl)-2-(1H) pyridone, | |
| 5-Methyl-1-(2′-thiazolyl)-2-(1H) pyridone, | |
| 3,6-Dimethyl-1-phenyl-2-(1H) pyridone, | |
| 1-(4′Chlorophenyl)-5-Methyl-2-(1H) | |
| pyridone, | |
| 1-(2′-Imidazolyl)-5-Methyl-2-(1H) | |
| pyridone, | |
| 1-(4′-Nitrophenyl)-2-(1H) pyridone, | |
| 1-(2′-Furyl)-5-Methyl-2-(1H) pyridone, | |
| 1-Phenyl-3-(4′-chlorophenyl)-2-(1H) | |
| pyridine. | |

[1011] U.S. Pat. Nos. 3,974,281; 3,839,346; 4,042,6102; 4,052,509; 5,310,562; 5,518,729; 5,716,632; and 6,090,822 describe methods for the synthesis and formulation of pirfenidone and specific pirfenidone analogs in pharmaceutical compositions suitable for use in the methods of the present invention.

TNF Antagonists

[1012] Suitable TNF-α antagonists for use herein include agents that decrease the level of TNF-α synthesis, agents that block or inhibit the binding of TNF-α to a TNF-α receptor (TNFR), and agents that block or inhibit TNFR-mediated signal transduction. Unless otherwise expressly stated, every reference to a “TNF-α antagonist” or “TNF antagonist” herein will be understood to mean a TNF-α antagonist other than SAPK inhibitors (including pirfenidone and pirfenidone analogs).

[1013] As used herein, the terms “TNF receptor polypeptide” and “TNFR polypeptide” refer to polypeptides derived from TNFR (from any species) that are capable of binding TNF. Two distinct cell-surface TNFRs have described: Type II TNFR (or p75 TNFR or TNFR11) and Type I TNFR (or p55 TNFR or TNFR1). The mature full-length human p75 TNFR is a glycoprotein having a molecular weight of about 75-80 kilodaltons (kD). The mature full-length human p55 TNFR is a glycoprotein having a molecular weight of about 55-60 kD. Exemplary TNFR polypeptides are derived from TNFR Type I and/or TNFR type II. Soluble TNFR includes p75 TNFR polypeptide; fusions of p75 TNFR with heterologous fusion partners, e.g., the Fc portion of an immunoglobulin.

[1014] TNFR polypeptide may be an intact TNFR or a suitable fragment of TNFR. U.S. Pat. No. 5,605,690 provides examples of TNFR polypeptides, including soluble TNFR polypeptides, appropriate for use in the present invention. In many embodiments, the TNFR polypeptide comprises an extracellular domain of TNFR. In some embodiments, the TNFR polypeptide is a fusion polypeptide comprising an extracellular domain of TNFR linked to a constant domain of an immunoglobulin molecule. In other embodiments, the TNFR polypeptide is a fusion polypeptide comprising an extracellular domain of the p75 TNFR linked to a constant domain of an IgG1 molecule. In some embodiments, when administration to humans is contemplated, an Ig used for fusion proteins is human, e.g., human IgG1.

[1015] Monovalent and multivalent forms of TNFR polypeptides may be used in the present invention. Multivalent forms of TNFR polypeptides possess more than one TNF binding site. In some embodiments, the TNFR is a bivalent, or dimeric, form of TNFR. For example, as described in U.S. Pat. No. 5,605,690 and in Mohler et al., 11023, J. Immunol., 151:1548-1561, a chimeric antibody polypeptide with TNFR extracellular domains substituted for the variable domains of either or both of the immunoglobulin heavy or light chains would provide a TNFR polypeptide for the present invention. Generally, when such a chimeric TNFR:antibody polypeptide is produced by cells, it forms a bivalent molecule through disulfide linkages between the immunoglobulin domains. Such a chimeric TNFR:antibody polypeptide is referred to as TNFR:Fc.

[1016] In one embodiment, a subject method involves administration of an effective amount of the soluble TNFR ENBREL® etanercept. ENBREL® is a dimeric fusion protein consisting of the extracellular ligand-binding portion of the human 75 kilodalton (p75) TNFR linked to the Fc portion of human IgG1. The Fc component of ENBREL® contains the CH2 domain, the CH3 domain and hinge region, but not the CH1 domain of IgG1. ENBREL® is produced in a Chinese hamster ovary (CHO) mammalian cell expression system. It consists of 934 amino acids and has an apparent molecular weight of approximately 150 kilodaltons. Smith et al. (11020) Science 248:1019-1023; Mohler et al. (11023) J. Immunol. 151:1548-1561; U.S. Pat. No. 5,395,760; and U.S. Pat. No. 5,605,690.

[1017] Also suitable for use are monoclonal antibodies that bind TNF-α. Monoclonal antibodies include “humanized” mouse monoclonal antibodies; chimeric antibodies; monoclonal antibodies that are at least about 80%, at least about 90%, at least about 95%, or 100% human in amino acid sequence; and the like. See, e.g., WO 90/10077; WO 90/04036; and WO 92/02190. Suitable monoclonal antibodies include antibody fragments, such as Fv, F(ab′)₂ and Fab; synthetic antibodies; artificial antibodies; phage display antibodies; and the like.

[1018] Examples of suitable monoclonal antibodies include infliximab (REMICADE®, Centocor); and adalimumab (HUMIRA™, Abbott) REMICADE® is a chimeric monoclonal anti-TNF-α antibody that includes about 25% mouse amino acid sequence and about 75% human amino acid sequence. REMICADE® comprises a variable region of a mouse monoclonal anti-TNF-α antibody fused to the constant region of a human IgG1. Elliott et al. (11023) Arthritis Rheum. 36:1681-1690; Elliott et al. (11024) Lancet 344:1105-1110; Baert et al. (11029) Gastroenterology 116:22-28. HUMIRA™ is a human, full-length IgG1 monoclonal antibody that was identified using phage display technology. Piascik (2003) J. Am. Pharm. Assoc. 43:327-328.

[1019] Methods to assess TNF antagonist activity are known in the art and exemplified herein. For example, TNF antagonist activity may be assessed with a cell-based competitive binding assay. In such an assay, radiolabeled TNF is mixed with serially diluted TNF antagonist and cells expressing cell membrane bound TNFR. Portions of the suspension are centrifuged to separate free and bound TNF and the amount of radioactivity in the free and bound fractions determined. TNF antagonist activity is assessed by inhibition of TNF binding to the cells in the presence of the TNF antagonist.

[1020] As another example, TNF antagonists may be analyzed for the ability to neutralize TNF activity in vitro in a bioassay using cells susceptible to the cytotoxic activity of TNF as target cells. In such an assay, target cells, cultured with TNF, are treated with varying amounts of TNF antagonist and subsequently are examined for cytolysis. TNF antagonist activity is assessed by a decrease in TNF-induced target cell cytolysis in the presence of the TNF antagonist.

TGF-β Antagonists

[1021] TGF-β antagonists suitable for use in a subject treatment method include agents that decrease the level of TGF-β, synthesis, agents that block or inhibit the binding of TGF-β to a TGF-β receptor, and agents that block or inhibit TGF-β receptor-mediated signal transduction. As used herein, the term “TGF-β antagonist” refers to any agent that decreases the level of TGF-β synthesis, any agent that blocks or inhibits the binding of TGF-β to a TGF-β receptor, and any agent that blocks or inhibits TGF-β receptor-mediated signal transduction. Unless otherwise expressly stated, every reference to a “TGF-β antagonist” herein will be understood to mean a TGF-β antagonist other than SAPK inhibitors (including pirfenidone and pirfenidone analogs). As used herein, the term “TGF-β” includes any TGF-β subtype, including TGF-β1, TGF-β2, and TGF-β3. Suitable TGF-β antagonists include, but are not limited to, antibodies specific for TGF-β (including antibodies specific for a particular TGF-β subtype; and antibodies cross-reactive with two or more TGF-β subtypes); antibodies to TGF-β receptor; soluble TGF-P receptor; decorin; and agents that inhibit TGF-β signaling.

[1022] Suitable TGF-β antagonists include antibodies specific for TGF-β. Antibodies specific for TGF-β are known in the art. See, e.g., U.S. Pat. Nos. 5,783,185, 5,772,1028, 5,674,843, 5,571,714, 5,462,925, and 5,426,098; WO 97/13844; and U.S. Patent Publication Nos 20030064069 and 20030091566. Non-limiting examples of suitable anti-TGF-β antibodies include CAT-152 (lerdelibumab; Trabio™; Cambridge Antibody Technology), a human anti-TGF-β2 monoclonal antibody; CAT-192 (metelimumab; Cambridge Antibody Technology), a human anti-TGF-β1 monoclonal antibody; and GC-1008 (Genzyme Corp.), a pan-specific human monoclonal antibody to TGF-β1, TGF-β2, and TGF-β3.

[1023] Suitable TGF-β antagonists include soluble TGF-β receptors. Soluble TGF-β, receptors typically lack most or all of the transmembrane portion of a naturally-occurring TGF-β receptor, such that the protein is not membrane bound, yet retains TGF-β binding. Soluble TGF-β receptors include soluble fusion proteins comprising a portion of a TGF-β receptor fused in-frame to a heterologous (non-TGF-β receptor) protein (a “fusion partner”). Non-limiting examples of fusion partners are immunoglobulin Fc, poly-histidine, and the like. Soluble TGF-β receptors have been described in the art. See, e.g., Wang et al. (11029) Thorax 54:805-812; George et al. (11029) Proc. Natl. Acad. Sci. USA 96:12719-12724; Muraoka et al. (2002) J. Clin. Invest. 109:1551-1559; and Yata et al. (2002) Hepatology 35:1022-1030.

[1024] TGF-β antagonists include Gleevec™. Gleevec™ (also known as STI-571, or CGP57148B) has the chemical name 4-[(4-methyl-1-piperazinyl)methyl]-N-[4-methyl-3-[[4-(3-pyridinyl)-2-pyrimidinyl]amino-phenyl]benzamide methanesulfonate is commonly known as imatinib mesylate and sold under the trademark Gleevec™. Gleevec™ is a 2-phenylaminopyrimidine that targets the ATP-binding site of the kinase domain of Bcr-Abl tyrosine kinase (see, e.g. Druker et al. (11026) Nature Med. 2, 561; and Buchdunger et al. (11023) Proc. Natl. Acad. Sci. USA 92:2558-2562).

[1025] In certain embodiments, the agents are pyrimidine derivatives as described in U.S. Pat. No. 5,521,184, the disclosure of which is herein incorporated by reference. In these embodiments, of interest are N-phenyl-2-pyrimidine-amine derivatives of formula (I):

[chemical structure]

[1026] wherein

[1027] R_{9′} is hydrogen or lower alkyl,

[1028] X is oxo, thio, imino, N-lower alkyl-imino, hydroximino or O-lower alkyl-hydroximino,

[1029] Y is oxygen or the group NH,

[1030] k is 0 or 1 and

[1031] R10 is an aliphatic radical having at least 5 carbon atoms, or an aromatic, aromatic-aliphatic, cycloaliphatic, cycloaliphatic-aliphatic, heterocyclic or heterocyclic-aliphatic radical,

[1032] and the remaining radicals R_{4′}, R_{5′}, R_{6′}, R₇ and R_{8′} are each independently of the others hydrogen, lower alkyl that is unsubstituted or substituted by free or alkylated amino, piperazinyl, piperidinyl, pyrrolidinyl or by morpholinyl, or lower alkanoyl, trifluoromethyl, free, etherified or esterifed hydroxy, free, alkylated or acylated amino or free or esterified carboxy,

[1033] and salts of such compounds having at least one salt-forming group.

[1034] In these embodiments:

[1035] 1-Methyl-1 H-pyrrolyl is preferably 1-methyl-1 H-pyrrol-2-yl or 1-methyl-1-H-pyrrol-3-yl

[1036] Amino- or amino-lower alkyl-substituted phenyl R1 wherein the amino group in each case is free, alkylated or acylated, is phenyl substituted in any desired position (ortho, meta or para) wherein an alkylated amino group is preferably mono- or di-lower alkylamino, for example dimethylamino, and the lower alkyl moiety of amino-lower alkyl is preferably linear C₁-C₃ alkyl, such as especially methyl or ethyl.

[1037] 1H-Indolyl bonded at a carbon atom of the five-membered ring is 1H-indol-2-yl or 1H-indol-3-yl.

[1038] Unsubstituted or lower alkyl-substituted pyridyl bonded at a ring carbon atom is lower alkyl-substituted or preferably unsubstituted 2-, or preferably 3- or 4-pyridyl, for example 3-pyridyl, 2-methyl-3-pyridyl, 4-methyl-3-pyridyl or 4-pyridyl. Pyridyl substituted at the nitrogen atom by oxygen is a radical derived from pyridine N-oxide, i.e., N-oxido-pyridyl, e.g. N-oxido-4-pyridyl.

[1039] Fluoro-substituted lower alkoxy is lower alkoxy carrying at least one, but preferably several, fluoro substituents, especially trifluoromethoxy or preferably 1,1,2,2-tetrafluoro-ethoxy.

[1040] When X is oxo, thio, imino, N-lower alkyl-imino, hydroximino or O-lower alkyl-hydroximino, the group C═X is, in the above order, a radical C═O, C═S, C═N—H, C=N-lower alkyl, C═N—OH or CN—O-lower alkyl, respectively. X is preferably oxo.

[1041] k is preferably 0, i.e., the group Y is not present.

[1042] Y, if present, is preferably the group NH.

[1043] The term “lower” within the scope of this text denotes radicals having up to and including 7, preferably up to and including 4 carbon atoms.

[1044] Lower alkyl R_{1′}, R_{2′}, R_{3′} and R_{9′} is preferably methyl or ethyl.

[1045] An aliphatic radical R₁₀ having at least 5 carbon atoms preferably has not more than 22 carbon atoms, generally not more than 10 carbon atoms, and is such a substituted or preferably unsubstituted aliphatic hydrocarbon radical, that is to say such a substituted or preferably unsubstituted alkynyl, alkenyl or preferably alkyl radical, such as C₅-C₇ alkyl, for example n-pentyl. An aromatic radical R₁₀ has up to 20 carbon atoms and is unsubstituted or substituted, for example in each case unsubstituted or substituted naphthyl, such as especially 2-naphthyl, or preferably phenyl, the substituents preferably being selected from cyano, unsubstituted or hydroxy-, amino- or 4-methyl-piperazinyl-substituted lower alkyl, such as especially methyl, trifluoromethyl, free, etherified or esterified hydroxy, free, alkylated or acylated amino and free or esterified carboxy. In an aromatic-aliphatic radical R₁₀ the aromatic moiety is as defined above and the aliphatic moiety is preferably lower alkyl, such as especially C₁-C₂ alkyl, which is substituted or preferably unsubstituted, for example benzyl. A cycloaliphatic radical R10 has especially up to 30, more especially up to 20, and most especially up to 10 carbon atoms, is mono- or poly-cyclic and is substituted or preferably unsubstituted, for example such a cycloalkyl radical, especially such a 5- or 6-membered cycloalkyl radical, such as preferably cyclohexyl. In a cycloaliphatic-aliphatic radical R10 the cycloaliphatic moiety is as defined above and the aliphatic moiety is preferably lower alkyl, such as especially C₁-C₂ alkyl, which is substituted or preferably unsubstituted. A heterocyclic radical R10 contains especially up to 20 carbon atoms and is preferably a saturated or unsaturated monocyclic radical having 5 or 6 ring members and 1-3 hetero atoms which are preferably selected from nitrogen, oxygen and sulfur, especially, for example, thienyl or 2-, 3- or 4-pyridyl, or a bi- or tri-cyclic radical wherein, for example, one or two benzene radicals are annellated (fused) to the mentioned monocyclic radical. In a heterocyclic-aliphatic radical R₁₀ the heterocyclic moiety is as defined above and the aliphatic moiety is preferably lower alkyl, such as especially C₁-C₂ alkyl, which is substituted or preferably unsubstituted.

[1046] Etherified hydroxy is preferably lower alkoxy. Esterified hydroxy is preferably hydroxy esterified by an organic carboxylic acid, such as a lower alkanoic acid, or a mineral acid, such as a hydrohalic acid, for example lower alkanoyloxy or especially halogen, such as iodine, bromine or especially fluorine or chlorine.

[1047] Alkylated amino is for example, lower alkylamino, such as methylamino, or di-lower alkylamino, such as dimethylamino. Acylated amino is, for example, lower alkanoylamino or benzoylamino.

[1048] Esterified carboxy is, for example, lower alkoxycarbonyl, such as methoxycarbonyl.

[1049] A substituted phenyl radical may carry up to 5 substituents, such as fluorine, but especially in the case of relatively large substituents is generally substituted by only from 1 to 3 substituents. Examples of substituted phenyl that may be given special mention are 4-chloro-phenyl, pentafluoro-phenyl, 2-carboxy-phenyl, 2-methoxy-phenyl, 4-fluorophenyl, 4-cyano-phenyl and 4-methyl-phenyl.

[1050] Salt-forming groups in a compound of formula (I) are groups or radicals having basic or acidic properties. Compounds having at least one basic group or at least one basic radical, for example a free amino group, a pyrazinyl radical or a pyridyl radical, may form acid addition salts, for example with inorganic acids, such as hydrochloric acid, sulfuric acid or a phosphoric acid, or with suitable organic carboxylic or sulfonic acids, for example aliphatic mono- or di-carboxylic acids, such as trifluoroacetic acid, acetic acid, propionic acid, glycolic acid, succinic acid, maleic acid, fumaric acid, hydroxymaleic acid, malic acid, tartaric acid, citric acid or oxalic acid, or amino acids such as arginine or lysine, aromatic carboxylic acids, such as benzoic acid, 2-phenoxy-benzoic acid, 2-acetoxybenzoic acid, salicylic acid, 4-aminosalicylic acid, aromatic-aliphatic carboxylic acids, such as mandelic acid or cinnamic acid, heteroaromatic carboxylic acids, such as nicotinic acid or isonicotinic acid, aliphatic sulfonic acids, such as methane-, ethane- or 2-hydroxyethane-sulfonic acid, or aromatic sulfonic acids, for example benzene-, p-toluene- or naphthalene-2-sulfonic acid. When several basic groups are present mono- or poly-acid addition salts may be formed.

[1051] Compounds of formula (I) having acidic groups, for example a free carboxy group in the radical R₁₀, may form metal or ammonium salts, such as alkali metal or alkaline earth metal salts, for example sodium, potassium, magnesium or calcium salts, or ammonium salts with ammonia or suitable organic amines, such as tertiary monoamines, for example triethylamine or tri-(2-hydroxyethyl)-amine, or heterocyclic bases, for example N-ethylpiperidine or N,N′-dimethyl-piperazine.

[1052] Compounds of formula (I) having both acidic and basic groups can form internal salts.

[1053] Of particular interest in these embodiments is a pyrimidine derivative in which R1′ is 3-pyridyl, R_{2′}, R_{3′}, R_{5′}, R_{6′}, and R_{8′} are each hydrogen, R_{4′} is methyl, and R_{7′} is a group of formula (II) in which R_{9′} is hydrogen, X is oxo, k is 0, and R10 is 4-[(4-methyl-1-piperazinyl)methyl]phenyl. The mesylate salt of this compound having the chemical name 4-[(4-methyl-1-piperazinyl)methyl]-N-[4-methyl-3-[[4-(3-pyridinyl)-2-pyrimidinyl]amino-phenyl]benzamide methanesulfonate is now commonly known as imatinib mesylate and sold under the trademark Gleevec™.

Endothelin Receptor Antagonists

[1054] Endothelin antagonists suitable for use in the present invention include gents that decrease the level of endothelin synthesis, agents that block or inhibit the binding of endothelin to an endothelin receptor, and agents that block or inhibit endothelin receptor-mediated signal transduction. As used herein, the term “endothelin antagonist” refers to any agent that decreases the level of endothelin synthesis, any agent that blocks or inhibits the binding of endothelin to an endothelin receptor, and any agent that blocks or inhibits endothelin receptor-mediated signal transduction.

[1055] In some embodiments, an endothelin receptor antagonist is selective for endothelin A (ETA) receptors. In some embodiments, an endothelin receptor antagonist is selective for endothelin B (ETB) receptors. In other embodiments, an endothelin receptor antagonist is an antagonist of both ETA and ETB receptors.

[1056] Specific examples of endothelin antagonists useful in the present invention include, but are not limited to, atrasentan (ABT-627; Abbott Laboratories), Veletri™ (tezosentan; Actelion Pharmaceuticals, Ltd.), sitaxsentan (ICOS-Texas Biotechnology), enrasentan (GlaxoSmithKline), darusentan (LU135252; Myogen) BMS-207940 (Bristol-Myers Squibb), BMS-193884 (Bristol-Myers Squibb), BMS-182874 (Bristol-Myers Squibb), J-104132 (Banyu Pharmaceutical), VML 588/Ro 61-1790 (Vanguard Medica), T-0115 (Tanabe Seiyaku), TAK-044 (Takeda), BQ-788 (Banyu Pharmaceutical), BQ123, YM-598 (Yarnanouchi Pharma), PD 145065 (Parke-Davis), A-127722 (Abbott Laboratories), A-192621 (Abbott Laboratories), A-182086 (Abbott Laboratories), TBC3711 (ICOS-Texas Biotechnology), BSF208075 (Myogen), S-0139 (Shionogi), TBC2576 (Texas Biotechnology), TBC3214 (Texas Biotechnology), PD156707 (Parke-Davis), PD180988 (Parke-Davis), ABT-546 (Abbott Laboratories), ABT-627 (Abbott Laboratories), SB247083 (GlaxoSmithKline), SB 209670 (GlaxoSmithKline); and an endothelin receptor antagonists discussed in the art, e.g., Davenport and Battistini (2002) Clinical Science 103:15-35, Wu-Wong et al. (2002) Clinical Science 103:1075-1115, and Luescher and Barton (2000) Circulation 102:2434-2440.

[1057] A suitable endothelin receptor antagonist is TRACLEER™ (bosentan; manufactured by Actelion Pharmaceuticals, Ltd.). TRACLEER™ is an orally active dual endothelin receptor antagonist, and blocks the binding of endothelin to both of its receptors endothelin receptor A and endothelin receptor B.

[1058] TRACLEER™ belongs to a class of highly substituted pyrimidine derivatives, with no chiral centers. It is designated chemically as 4-tert-butyl-N-[6-(2-hydroxy-ethoxy)-5-(2-methoxy-phenoxy)-[2,2′]-bipyrimidin-4-yl]-benzenesulfonamide monohydrate and has the following structural formula:

[chemical structure]

[1059] TRACLEER™ treatment is in some embodiments administered at a dose of 62.5 mg bid orally for 4 weeks, followed by a maintenance dose of 125 mg bid orally.

N-Acetylcysteine (NAC)

[1060] N-acetylcysteine (NAC) is a stable form of the sulfur amino acid L-cysteine. NAC is an anti-oxidant that scavenges H₂O₂ and other radicals. It is a precursor of glutathione (a major antioxidant), providing cysteine substrate for glutathione synthesis. NAC is commercially available as an over-the-counter nutritional supplement or nutraceutical product. Suitable NAC products for use herein include the NAC nutritional supplement products made by Source Naturals (1000 mg tablets), Biochem (750 mg tablets), Twinlab (600 mg tablets), Nutricology/Allergy Research Group (500 mg tablets), and the like. Such products can be purchased at minimal cost from health food stores and nutritional supplement retailers, such as General Nutrion Corporation (GNC).

Thymosin-α

[1061] Thymosin-α (Zadaxin™; available from SciClone Pharmaceuticals, Inc., San Mateo, Calif.) is a synthetic form of thymosin alpha 1, a hormone found naturally in the circulation and produced by the thymus gland. Thymosin-α increases activity of T cells and NK cells. Zadaxin™ formulated for subcutaneous injection is a purified sterile lyophilized preparation of chemically synthesized thymosin alpha 1 identical to human thymosin alpha 1. Thymosin alpha 1 is an acetylated polypeptide with the following sequence: Ac-Ser-Asp-Ala-Ala-Val-Asp-Thr-Ser-Ser-Glu-Ile-Thr-Thr-Lys-Asp-Leu-Lys-Glu-Lys-Lys-Glu-Val-Val-Glu-Glu-Ala-Glu-Asn-OH (SEQ ID NO: 103), and having a molecular weight of 3,108 daltons. The lyophilized preparation contains 1.6 mg synthetic thymosin-α, 50 mg mannitol, and sodium phosphate buffer to adjust the pH to 6.8.

Ribavirin

[1062] Ribavirin, 1-O-D-ribofuranosyl-1H-1,2,4-triazole-3-carboxamide, available from ICN Pharmaceuticals, Inc., Costa Mesa, Calif., is described in the Merck Index, compound No. 81102, Eleventh Edition. Its manufacture and formulation is described in U.S. Pat. No. 4,211,771. The invention also contemplates use of derivatives of ribavirin (see, e.g., U.S. Pat. No. 6,277,830). The ribavirin may be administered orally in capsule or tablet form, or in the same or different administration form and in the same or different route as the IFN-α (either PEGylated or non-PEGylated form). Of course, other types of administration of both medicaments, as they become available are contemplated, such as by nasal spray, transdermally, by suppository, by sustained release dosage form, etc. Any form of administration will work so long as the proper dosages are delivered without destroying the active ingredient.

[1063] Ribavirin is generally administered in an amount ranging from about 400 mg to about 1200 mg, from about 600 mg to about 1000 mg, or from about 700 to about 900 mg per day. In some embodiments, ribavirin is administered throughout the entire course of PEGylated IFN-α or non-PEGylated IFN-α therapy. In other embodiments, ribavirin is administered only during the first period of time. In still other embodiments, ribavirin is administered only during the second period of time.

Levovirin

[1064] Levovirin is the L-enantiomer of ribavirin, and exhibits the property of enhancing a Th1 immune response over a Th2 immune response. Levovirin is manufactured by ICN Pharmaceuticals.

[1065] Levovirin has the following structure: [chemical structure]
Viramidine

[1066] Viramidine is a 3-carboxamidine derivative of ribavirin, and acts as a prodrug of ribavirin. It is efficiently converted to ribavirin by adenosine deaminases.

[1067] Viramidine has the following structure: [chemical structure]
Nucleoside Analogs

[1068] Nucleoside analogs that are suitable for use in a subject therapy include, but are not limited to, ribavirin, levovirin, viramidine, isatoribine, an L-ribofuranosyl nucleoside as disclosed in U.S. Pat. No. 5,559,101 and encompassed by Formula I of U.S. Pat. No. 5,559,101 (e.g., 1-O-L-ribofuranosyluracil, 1-O-L-ribofuranosyl-5-fluorouracil, 1-β-L-ribofuranosylcytosine, 9-β-L-ribofuranosyladenine, 9-β-L-ribofuranosylhypoxanthine, 9-β-L-ribofuranosylguanine, 9-β-L-ribofuranosyl-6-thioguanine, 2-amino-α-L-ribofuranl[1′,2′:4,5]oxazoline, O²,O²-anhydro-1-α-L-ribofuranosyluracil, 1-α-L-ribofuranosyluracil, 1-(2,3,5-tri-O-benzoyl-α-ribofuranosyl)-4-thiouracil, 1-α-L-ribofuranosylcytosine, 1-α-L-ribofuranosyl-4-thiouracil, 1-α-L-ribofuranosyl-5-fluorouracil, 2-amino-α-L-arabinofurano[1′,2′:4,5]oxazoline, O₂,O²-anhydro-β-L-arabinofuranosyluracil, 2′-deoxy-β-L-uridine, 3′5′-Di-O-benzoyl-2′-deoxy-4-thio β-L-uridine, 2′-deoxy-β-L-cytidine, 2′-deoxy-β-L-4-thiouridine, 2′-deoxy-β-L-thymidine, 2′-deoxy-β-L-5-fluorouridine, 2′,3′-dideoxy-β-L-uridine, 2′-deoxy-β-L-5-fluorouridine, and 2′-deoxy-β-L-inosine); a compound as disclosed in U.S. Pat. No. 6,423,695 and encompassed by Formula I of U.S. Pat. No. 6,423,695; a compound as disclosed in U.S. Patent Publication No. 2002/0058635, and encompassed by Formula 1 of U.S. Patent Publication No. 2002/0058635; a nucleoside analog as disclosed in WO 01/90121 A2 (Idenix); a nucleoside analog as disclosed in WO 02/0610203 A2 (Biocryst Pharmaceuticals Inc.); a nucleoside analog as disclosed in WO 02/057287 A2 or WO 02/057425 A2 (both Merck/Isis); and the like.

HCV NS3 Inhibitors

[1069] Suitable HCV non-structural protein-3 (NS3) inhibitors include, but are not limited to, a tri-peptide as disclosed in U.S. Pat. Nos. 6,642,204, 6,534,523, 6,420,380, 6,410,531, 6,329,417, 6,329,379, and 6,323,180 (Boehringer-Ingelheim); a compound as disclosed in U.S. Pat. No. 6,143,715 (Boehringer-Ingelheim); a macrocyclic compound as disclosed in U.S. Pat. No. 6,608,027 (Boehringer-Ingelheim); an NS3 inhibitor as disclosed in U.S. Pat. Nos. 6,617,309, 6,608,067, and 6,265,380 (Vertex Pharmaceuticals); an azapeptide compound as disclosed in U.S. Pat. No. 6,624,290 (Schering); a compound as disclosed in U.S. Pat. No. 5,1020,276 (Schering); a compound as disclosed in Pause et al. (2003) J. Biol. Chem. 278:20374-20380; NS3 inhibitor BILN 2061 (Boehringer-Ingelheim; Lamarre et al. (2002) Hepatology 36:301A; and Lamarre et al. (Oct. 26, 2003) Nature doi:10.1038/nature020102); NS3 inhibitor VX-950 (Vertex Pharmaceuticals; Kwong et al. (Oct. 24-28, 2003) 54^{th} Ann. Meeting AASLD); NS3 inhibitor SCH6 (Abib et al. (Oct. 24-28, 2003) Abstract 137. Program and Abstracts of the 54th Annual Meeting of the American Association for the Study of Liver Diseases (AASLD). Oct. 24-28, 2003. Boston, Mass.); any of the NS3 protease inhibitors disclosed in WO 102/07733, WO 102/07734, WO 00/09558, WO 00/09543, WO 00/510229 or WO 02/060926 (e.g., compounds 2, 3, 5, 6, 8, 10, 11, 18, 19, 29, 30, 31, 32, 33, 37, 38, 55, 59, 71, 91, 103, 104, 105, 112, 113, 114, 115, 116, 120, 122, 123, 124, 125, 126 and 127 disclosed in the table of pages 224-226 in WO 02/060926); an NS3 protease inhibitor as disclosed in any one of U.S. Patent Publication Nos. 2003019067, 20030187018, and 20030186895; and the like.

[1070] Of particular interest in many embodiments are NS3 inhibitors that are specific NS3 inhibitors, e.g., NS3 inhibitors that inhibit NS3 serine protease activity and that do not show significant inhibitory activity against other serine proteases such as human leukocyte elastase, porcine pancreatic elastase, or bovine pancreatic chymotrypsin, or cysteine proteases such as human liver cathepsin B.

[1071] Of particular interest in some embodiments as NS3 inhibitors that inhibit HCV non-structural protein-4 (NS4) helicase activity and that do not show significant inhibitory activity against other serine proteases such as human leukocyte elastase, porcine pancreatic elastase, or bovine pancreatic chymotrypsin, or cysteine proteases such as human liver cathepsin B.

NS5B Inhibitors

[1072] Suitable HCV non-structural protein-5 (NS5; RNA-dependent RNA polymerase) inhibitors include, but are not limited to, a compound as disclosed in U.S. Pat. No. 6,479,508 (Boehringer-Ingelheim); a compound as disclosed in any of International Patent Application Nos. PCT/CA02/01127, PCT/CA02/01128, and PCT/CA02/01129, all filed on Jul. 18, 2002 by Boehringer Ingelheim; a compound as disclosed in U.S. Pat. No. 6,440,985 (ViroPharma); a compound as disclosed in WO 01/47883, e.g., JTK-003 (Japan Tobacco); a dinucleotide analog as disclosed in Zhong et al. (2003) Antimicrob. Agents Chemother. 47:2674-2681; a benzothiadiazine compound as disclosed in Dhanak et al. (2002) J. Biol. Chem. 277(41):38322-7; an NS5B inhibitor as disclosed in WO 02/100846 A1 or WO 02/100851 A2 (both Shire); an NS5B inhibitor as disclosed in WO 01/85172 A1 or WO 02/098424 A1 (both Glaxo SmithKline); an NS5B inhibitor as disclosed in WO 00/06529 or WO 02/06246 A1 (both Merck); an NS5B inhibitor as disclosed in WO 03/000254 (Japan Tobacco); an NS5B inhibitor as disclosed in EP 1 256,628 A2 (Agouron); JTK-002 (Japan Tobacco); JTK-109 (Japan Tobacco); and the like.

[1073] Of particular interest in many embodiments are NS5 inhibitors that are specific NS5 inhibitors, e.g., NS5 inhibitors that inhibit NS5 RNA-dependent RNA polymerase and that lack significant inhibitory effects toward other RNA dependent RNA polymerases and toward DNA dependent RNA polymerases.

Alpha-Glucosidase Inhibitors

[1074] Alpha-glucosidase inhibitors are a class of oral medications for type 2 diabetes that decrease the absorption of carbohydrates from the intestine, resulting in a slower rise in blood glucose throughout the day, especially following meals, in type 2 diabetic patients. Alpha-glucosidase inhibitors suitable for use in a subject combination therapy include, but are not limited to, n-(n-nonyl)-deoxygalactonojirimycin (n,n-DGJ); N-nonyl-deoxynojirimycin (N-nonyl-DNJ); N-butyl-deoxynojirimycin (NB-DNJ); 1-deoxynoj irimycin (DNM); perbutylated-N-butyl-1-deoxynoj iromycin (p-N-butyl-DNJ); and 6-O-butanoyl castanospermine; and the like.

Additional Antiviral Therapeutic Agents

[1075] Additional antiviral therapeutic agents that can be administered in a subject combination therapy include, but are not limited to, alpha-glucosidase inhibitors; inhibitors of inosine monophosphate dehydrogenase (IMPDH); ribozymes that are complementary to viral nucleotide sequences; antisense RNA inhibitors; and the like.

Alpha-Glucosidase Inhibitors

[1076] Alpha-glucosidase inhibitors are a class of oral medications for type 2 diabetes that decrease the absorption of carbohydrates from the intestine, resulting in a slower rise in blood glucose throughout the day, especially following meals, in type 2 diabetic patients. Alpha-glucosidase inhibitors suitable for use in a subject combination therapy include, but are not limited to, n-(n-nonyl)-deoxygalactonojirimycin (n,n-DGJ); N-nonyl-deoxynojirimycin (N-nonyl-DNJ); N-butyl-deoxynojirimycin (NB-DNJ); 1-deoxynojirimycin (DNM); perbutylated-N-butyl-1-deoxynojiromycin (p-N-butyl-DNJ); and 6-O-butanoyl castanospermine; and the like.

IMPDH Inhibitors

[1077] IMPDH inhibitors that are suitable for use in a subject combination therapy include, but are not limited to, VX-497 ((S)-N-3-[3-(3-methoxy-4-oxazol-5-yl-phenyl)-ureido]-benzyl-carbamic acid tetrahydrofuran-3-yl-ester); Vertex Pharmaceuticals; see, e.g., Markland et al. (2000) Antimicrob. Agents Chemother. 44:859-866); ribavirin; levovirin (Ribapharm; see, e.g., Watson (2002) Curr Opin Investig Drugs 3(5):680-3); viramidine (Ribapharm); and the like.

Ribozyme and Antisense

[1078] Ribozyme and antisense antiviral agents that are suitable for use in a subject combination therapy include, but are not limited to, ISIS 14803 (ISIS Pharmaceuticals/Elan Corporation; see, e.g., Witherell (2001) Curr Opin Investig Drugs. 2(11):1523-9); Heptazyme™; and the like.

Side Effect Management Agents

[1079] In some embodiments, a subject therapy comprises administering a palliative agent (e.g., an agent that reduces patient discomfort caused by a therapeutic agent), or other agent for the avoidance, treatment, or reduction of a side effect of a therapeutic agent. Such agents are also referred to as “side effect management agents.”

[1080] Suitable side effect management agents include agents that are effective in pain management; agents that ameliorate gastrointestinal discomfort; analgesics, anti-inflanunatories, antipsychotics, antineurotics, anxiolytics, and hematopoietic agents. In addition, the invention contemplates the use of any compound for palliative care of patients suffering from pain or any other side effect in the course of treatment with a subject therapy. Exemplary palliative agents include acetaminophen, ibuprofen, and other NSAIDs, H2 blockers, and antacids.

[1081] Analgesics that can be used to alleviate pain in the methods of the invention include non-narcotic analgesics such as non-steroidal anti-inflammatory drugs (NSAIDs) acetaminophen, salicylate, acetyl-salicylic acid (aspirin, diflunisal), ibuprofen, Motrin, Naprosyn, Nalfon, and Trilisate, indomethacin, glucametacine, acemetacin, sulindac, naproxen, piroxicam, diclofenac, benoxaprofen, ketoprofen, oxaprozin, etodolac, ketorolac tromethamine, ketorolac, nabumetone, and the like, and mixtures of two or more of the foregoing.

[1082] Other suitable analgesics include fentanyl, buprenorphine, codeine sulfate, morphine hydrochloride, codeine, hydromorphone (Dilaudid), levorphanol (Levo-Dromoran), methadone (Dolophine), morphine, oxycodone (in Percodan), and oxymorphone (Numorphan). Also suitable for use are benzodiazepines including, but not limited to, flurazepam (Dalmane), diazepam (Valium), and Versed, and the like.

Anti-Inflammatory Agents

[1083] Suitable anti-inflammatory agents include, but are not limited to, steroidal anti-inflammatory agents, and non-steroidal anti-inflammatory agents.

[1084] Suitable steroidal anti-inflammatory agents include, but are not limited to, hydrocortisone, hydroxyltriamcinolone, alpha-methyl dexamethasone, dexamethasone-phosphate, beclomethasone dipropionate, clobetasol valerate, desonide, desoxymethasone, desoxycorticosterone acetate, dexamethasone, dichlorisone, diflorasone diacetate, diflucortolone valerate, fluadrenolone, fluclorolone acetonide, fludrocortisone, flumethasone pivalate, fluosinolone acetonide, fluocinonide, flucortine butylester, fluocortolone, fluprednidene (fluprednylidene) acetate, flurandrenolone, halcinonide, hydrocortisone acetate, hydrocortisone butyrate, methylprednisolone, triamcinolone acetonide, conisone, cortodoxone, flucetonide, fludrocortisone, difluorosone diacetate, fluradrenolone acetonide, medrysone, amcinafel, amcinafide, betamethasone and the balance of its esters, chloroprednisone, chlorprednisone acetate, clocortelone, clescinolone, dichlorisone, difluprednate, flucloronide, flunisolide, fluoromethalone, fluperolone, fluprednisolone, hydrocortisone valerate, hydrocortisone cyclopentylpropionate, hydrocortamate, meprednisone, paramethasone, prednisolone, prednisone, beclomethasone dipropionate, triamcinolone, and mixtures of two or more of the foregoing.

[1085] Suitable non-steroidal anti-inflammatory agents, include, but are not limited to, 1) the oxicams, such as piroxicam, isoxicam, tenoxicam, and sudoxicam; 2) the salicylates, such as aspirin, disalcid, benorylate, trilisate, safapryn, solprin, diflunisal, and fendosal; 3) the acetic acid derivatives, such as diclofenac, fenclofenac, indomethacin, sulindac, tolmetin, isoxepac, furofenac, tiopinac, zidometacin, acematacin, fentiazac, zomepiract, clidanac, oxepinac, and felbinac; 4) the fenamates, such as mefenamic, meclofenamic, flufenarnic, niflumic, and tolfenamic acids; 5) the propionic acid derivatives, such as ibuprofen, naproxen, benoxaprofen, flurbiprofen, ketoprofen, fenoprofen, fenbufen, indoprofen, pirprofen, carprofen, oxaprozin, pranoprofen, miroprofen, tioxaprofen, suprofen, alminoprofen, and tiaprofenic; and 6) the pyrazoles, such as phenylbutazone, oxyphenbutazone, feprazone, azapropazone, and trimethazone, mixtures of these non-steroidal anti-inflammatory agents may also be employed, as well as the pharmaceutically-acceptable salts and esters of these agents.

[1086] Suitable anti-inflammatory agents include, but are not limited to, Alclofenac; Alclometasone Dipropionate; Algestone Acetonide; Alpha Amylase; Amcinafal; Amcinafide; Amfenac Sodium; Amiprilose Hydrochloride; Anakinra; Anirolac; Anitrazafen; Apazone; Balsalazide Disodium; Bendazac; Benoxaprofen; Benzydamine Hydrochloride; Bromelains; Broperamole; Budesonide; Carprofen; Cicloprofen; Cintazone; Cliprofen; Clobetasol Propionate; Clobetasone Butyrate; Clopirac; Cloticasone Propionate; Cormethasone Acetate; Cortodoxone; Deflazacort; Desonide; Desoximetasone; -Dexamethasone Dipropionate; Diclofenac Potassium; Diclofenac Sodium; Diflorasone Diacetate; -Diflumidone Sodium; Diflunisal; Difluprednate; Diftalone; Dimethyl Sulfoxide; Drocinonide; Endrysone; Enlimomab Enolicam Sodium; Epirizole; Etodolac; Etofenamate; Felbinac; Fenamole; Fenbufen; Fenclofenac; Fenclorac; Fendosal; Fenpipalone; Fentiazac; Flazalone; Fluazacort; Flufenamic Acid; Flumizole; Flunisolide Acetate; Flunixin; Flunixin Meglumine; Fluocortin Butyl; Fluorometholone Acetate; Fluquazone; Flurbiprofen; Fluretofen; Fluticasone Propionate; Furaprofen; Furobufen; Halcinonide; Halobetasol Propionate; Halopredone Acetate; Ibufenac; Ibuprofen; Ibuprofen Aluminum; Ibuprofen Piconol; Ilonidap; Indomethacin; Indomethacin Sodium; Indoprofen; Indoxole; Intrazole; Isoflupredone Acetate; Isoxepac; Isoxicam; Ketoprofen; Lofemizole Hydrochloride; Lomoxicam; Loteprednol Etabonate; Meclofenamate Sodium; Meclofenamic Acid; Meclorisone Dibutyrate; Mefenamic Acid; Mesalamine; Meseclazone; Methylprednisolone Suleptanate; Morniflumate; Nabumetone; Naproxen; Naproxen Sodium; Naproxol; Nimazone; Olsalazine Sodium; Orgotein; Orpanoxin; Oxaprozin; Oxyphenbutazone; Paranyline Hydrochloride; Pentosan Polysulfate Sodium; Phenbutazone Sodium Glycerate; Pirfenidone; Piroxicam; Piroxicam Cinnamate; Piroxicam Olamine; Pirprofen; Prednazate; Prifelone; Prodolic Acid; Proquazone; Proxazole; Proxazole Citrate; Rimexolone; Romazarit; Salcolex; Salnacedin; Salsalate; Sanguinarium Chloride; Seclazone; Sermetacin; Sudoxicam; Sulindac; Suprofen; Talmetacin; Talniflumate; Talosalate; Tebufelone; Tenidap; Tenidap Sodium; Tenoxicam; Tesicam; Tesimide; Tetrydamine; Tiopinac; Tixocortol Pivalate; Tolmetin; Tolmetin Sodium; Triclonide; Triflumidate; Zidometacin; Zomepirac Sodium.

[1087] Antipsychotic and antineurotic drugs that can be used to alleviate psychiatric side effects in the methods of the invention include any and all selective serotonin receptor inhibitors (SSRIs) and other anti-depressants, anxiolytics (e.g. alprazolam), etc. Anti-depressants include, but are not limited to, serotonin reuptake inhibitors such as Celexa®, Desyrel®, Effexor®, Luvox®, Paxil®, Prozac®, Zoloft®, and Serzone®; tricyclics such as Adapin®, Anafrinil®, Elavil®, Janimmineg, Ludiomil®, Pamelor®, Tofranil®, Vivactil®, Sinequan®, and Surmontil®; monoamine oxidase inhibitors such as Eldepryl®, Marplan®, Nardil®, and Parnate®. Anti-anxiety agents include, but are not limited to, azaspirones such as BuSpar®, benzodiazepines such as Ativan®, Librium®, Tranxene®, Centrax®, Klonopin®, Paxipam®, Serax®, Valium®, and Xanax®; and beta-blockers such as Inderal® and Tenormin®.

[1088] Agents that reduce gastrointestinal discomfort such as nausea, diarrhea, gastrointestinal cramping, and the like are suitable palliative agents for use in a subject combination therapy. Suitable agents include, but are not limited to, antiemetics, anti-diarrheal agents, H2 blockers, antacids, and the like.

[1089] Suitable H2 blockers (histamine type 2 receptor antagonists) that are suitable for use as a palliative agent in a subject therapy include, but are not limited to, Cimetidine (e.g., Tagamet, Peptol, Nu-cimet, apo-cimetidine, non-cimetidine); Ranitidine (e.g., Zantac, Nu-ranit, Novo-randine, and apo-ranitidine); and Famotidine (Pepcid, Apo-Famotidine, and Novo-Famotidine).

[1090] Suitable antacids include, but are not limited to, aluminum and magnesium hydroxide (Maalox®, Mylanta®); aluminum carbonate gel (Basajel®); aluminum hydroxide (Amphojel®, AltemaGEL®); calcium carbonate (Tums®, Titralac®); magnesium hydroxide; and sodium bicarbonate.

[1091] Antiemetics include, but are not limited to, 5-hydroxytryptophan-3 (5HT3) inhibitors; corticosteroids such as dexamethasone and methylprednisolone; Marinol® (dronabinol); prochlorperazine; benzodiazepines; promethazine; and metoclopramide cisapride; Alosetron Hydrochloride; Batanopride Hydrochloride; Bemesetron; Benzquinamide; Chlorpromazine; Chlorpromazine Hydrochloride; Clebopride; Cyclizine Hydrochloride; Dimenhydrinate; Diphenidol; Diphenidol Hydrochloride; Diphenidol Pamoate; Dolasetron Mesylate; Domperidone; Dronabinol; Fludorex; Flumeridone; Galdansetron Hydrochloride; Granisetron; Granisetron Hydrochloride; Lurosetron Mesylate; Meclizine Hydrochloride; Metoclopramide Hydrochloride; Metopimazine; Ondansetron Hydrochloride; Pancopride; Prochlorperazine; Prochlorperazine Edisylate; Prochlorperazine Maleate; Promethazine Hydrochloride; Thiethylperazine; Thiethylperazine Malate; Thiethylperazine Maleate; Trimethobenzamide Hydrochloride; Zacopride Hydrochloride.

[1092] Anti-diarrheal agents include, but are not limited to, Rolgamidine, Diphenoxylate hydrochloride (Lomotil), Metronidazole (Flagyl), Methylprednisolone (Medrol), Sulfasalazine (Azulfidine), and the like.

[1093] Suitable hematopoietic agents that can be used to prevent or restore depressed blood cell populations in the methods of the invention include erythropoietins, such as EPOGEN™ epoetin-alfa, granulocyte colony stimulating factors (G-CSFs), such as NEUPOGEN™ filgrastim, granulocyte-macrophage colony stimulating factors (GM-CSFs), thrombopoietins, etc.

Treatment Methods

[1094] The present invention provides a method of treating a disease, disorder, or condition in a patient. In one aspect, a subject treatment method utilizes an oral pharmaceutical formulation comprising a known hyperglycosylated, protease-resistant polypeptide variant of a parent protein therapeutic, the known protease-resistant polypeptide variant comprising at least one mutated protease cleavage site in place of a native protease cleavage site that is present in the parent protein therapeutic; and comprising: i) a carbohydrate moiety covalently attached to at least one non-native glycosylation site that is not present in the parent protein therapeutic; or ii) a carbohydrate moiety covalently attached to at least one native glycosylation site that is present but is not glycosylated in the parent protein therapeutic. The oral pharmaceutical composition is administered orally to the patient in an amount whereby the patient receives a first number of moles of the known hyperglycosylated, protease-resistant polypeptide variant at a first dosing interval. The first number of moles of the known hyperglycosylated, protease-resistant variant is greater than a second number of moles of the parent protein therapeutic in a parenteral pharmaceutical composition. The parenteral pharmaceutical composition is an immediate release formulation suitable for subcutaneous bolus injection, and the parent polypeptide is proven to be effective in the treatment of the disease, disorder or condition in the patient when administered to the patient by subcutaneous bolus injection in an amount of the parenteral pharmaceutical composition whereby the patient receives the second number of moles of the parent protein therapeutic at a second dosing interval. In a subject method of treating a disease in a patient, the method comprises administering orally to the patient the oral pharmaceutical composition in an amount whereby the patient receives the first number of moles of the known hyperglycosylated, protease-resistant polypeptide variant at the first dosing interval that is the same as or shorter than the second dosing interval.

[1095] Thus, the known hyperglycosylated, protease-resistant polypeptide variant is effective in the treatment of the disease, disorder or condition in a patient when administered to the patient orally at a dosage of the first number of moles at the first dosing interval for a desired treatment duration.

[1096] In another aspect, the invention provides a modification of the above-described method of treating a disease, disorder or condition in a patient, where the oral pharmaceutical composition comprising the known hyperglycosylated, protease-resistant polypeptide variant is administered orally to the patient in a first dose at a first dosing frequency, where the parenteral pharmaceutical composition is proven to be effective in the treatment of the disease in a patient when administered to the patient by subcutaneous bolus injection of a second dose of the parent protein therapeutic at a second dosing frequency, where the first dose in moles of the known hyperglycosylated, protease-resistant polypeptide variant per kilogram of patient body weight is greater than the second dose in moles of the parent protein therapeutic per kilogram of patient body weight when the first and second doses are calculated for the same patient body weight, and where upon oral administration of the first dose of the known hyperglycosylated, protease-resistant polypeptide variant to the patient, all of the known hyperglycosylated, protease-resistant polypeptide variant in the first dose is released in a period of time no greater than the period of time between doses in the second dosing frequency. In some embodiments, the parenteral pharmaceutical composition is proven to be effective in the treatment of the disease, disorder or condition in the patient when administered to the patient in a weight-based dose of the parent protein therapeutic at the second dosing interval, i.e., the second dose is a weight-based dose and the parenteral pharmaceutical composition is in a form that allows weight-based dosing. In some of the foregoing embodiments, the first dose is a weight-based dose of the known hyperglycosylated, protease-resistant polypeptide variant and the oral pharmaceutical composition is in a form that allows weight-based dosing.

[1097] In another aspect, the invention provides a modification of the above-described method of treating a disease, disorder or condition in a patient, where the oral pharmaceutical composition comprising the known hyperglycosylated, protease-resistant polypeptide variant is administered orally to the patient in a first dose at a first dosing frequency, where the parenteral pharmaceutical composition is proven to be effective in the treatment of the disease, disorder or condition in a patient when administered to the patient by subcutaneous bolus injection of a second dose of the parent protein therapeutic at a second dosing frequency, where the first dose in moles of the known hyperglycosylated, protease-resistant polypeptide variant per kilogram of patient body weight is greater than the second dose in moles of the parent protein therapeutic per kilogram of patient body weight when the first and second doses are calculated for the same patient body weight, and where the time period between doses in the first dosing frequency is the same as or shorter than the time period between doses in the second dosing frequency. In some embodiments, the parenteral pharmaceutical composition is proven to be effective in the treatment of the disease, disorder or condition in the patient when administered to the patient in a weight-based dose of the parent protein therapeutic at the second dosing interval, i.e., the second dose is a weight-based dose and the parenteral pharmaceutical composition is in a form that allows weight-based dosing. In some of the foregoing embodiments, the first dose is a weight-based dose and the oral pharmaceutical composition is in a form that allows weight-based dosing.

[1098] The choice of hyperglycosylated, protease-resistant polypeptide variant will depend in part on the disease, disorder, or condition being treated. As noted above, the desired hyperglycosylated, protease-resistant polypeptide variant is effective to treat the disease, disorder, or condition that is treatable with a parent protein therapeutic. The following are non-limiting examples.

Treatment Methods Using IFN-α

[1099] In one aspect, where the known hyperglycosylated, protease-resistant polypeptide variant is a known hyperglycosylated, protease-resistant IFN-α, a subject method provides for administering to an individual in need thereof a therapeutically effective amount of a known hyperglycosylated, protease-resistant IFN-α in a method of treating a viral infection, e.g., a hepatitis C virus (HCV) infection. In some embodiments, the method generally comprises orally administering a known hyperglycosylated, protease-resistant polypeptide variant of a parent IFN-α 2 to an individual in need thereof in a first dose at a first dosing frequency that is at least as frequent, or more frequent, than a second dosing frequency proven to be effective in a regimen for treatment of HCV infection comprising administering to an individual in need thereof a parenteral formulation of the parent IFN-α 2 in a second dose at the second dosing frequency, where the first dose comprises a first number of moles of the known hyperglycosylated, protease-resistant polypeptide variant that is greater than a second number of moles of the parent IFN-α 2 in the second dose.

[1100] In one non-limiting example, the parent IFN-α 2 is proven to be effective in the treatment of HCV infection in a method comprising administering to a patient in need thereof 3 million units (or 15 micrograms) of IFN-α 2 by subcutaneous bolus injection three times per week for 48 weeks. In some of these embodiments, the hyperglycosylated or protease-resistant, hyperglycosylated polypeptide variant of the parent IFN-α2 can be, e.g., selected from the group of the [D102N]IFN-α 2a, [D102N, D108N]IFN-α 2a, [D102N]IFN-α 2b, and [D102N, D108N]IFN-α 2b glycopeptide variants (where the amino acid numbering is as set forth in FIG. 24); where the variant further comprises one or more single amino acid replacements at one or more target positions corresponding to any of amino acid positions: 41, 58, 78, 107, 117, 125, 133 and 159 (where the amino acid numbering is as set forth in FIG. 2), or any of the mutations depicted in Table 1, such that the variant comprises at least one mutated protease cleavage site in place of a native protease cleavage site found in the parent IFN-α 2. The variant is administered orally to the patient in the first dose containing the first number of moles of the variant at the first dosing frequency, where the first number of moles is greater than the number of moles of the parent IFN-α2 in 3 million units (or 15 micrograms) of the parent IFN-α 2, and where the first dosing frequency is at least three times per week. Alternatively, the first dosing frequency is four times per week, five times per week, six times per week, once per day, twice per day, or three times per day.

[1101] In some embodiments, the invention provides any of the foregoing methods of treating HCV infection with a hyperglycosylated or protease-resistant, hyperglycosylated polypeptide variant of IFN-α 2, in which the hyperglycosylated or protease-resistant, hyperglycosylated polypeptide variant comprises any of the carrier peptides described in Table 9 above in a covalent or non-covalent association with the desired polypeptide variant. In some of these embodiments, the hyperglycosylated or protease-resistant, hyperglycosylated polypeptide variant comprises any such carrier peptide in a direct or indirect covalent linkage with the desired polypeptide variant, including without limitation any such carrier peptide fused to the N-terminus of the desired polypeptide variant.

[1102] In another non-limiting example, the parent IFN-α 2 is proven to be effective in the treatment of HCV infection in a method comprising administering to a patient in need thereof 15 micrograms (or 8.0×10⁻¹⁰ mol.) of IFN-α 2 by subcutaneous bolus injection three times per week for 48 weeks. In some of these embodiments, the hyperglycosylated or protease-resistant, hyperglycosylated polypeptide variant of the parent IFN-α 2 can be, e.g., selected from the group of the [D102N]IFN-α 2a, [D102N, D108N]IFN-α 2a; [D102N]IFN-α 2b, and [D102N, D108N]IFN-α 2b glycopeptide variants (where the amino acid numbering is as set forth in FIG. 24); where the variant further comprises one or more single amino acid replacements at one or more target positions corresponding to any of amino acid positions: 41, 58, 78, 107, 117, 125, 133 and 159 (where the amino acid numbering is as set forth in FIG. 2), or any of the mutations depicted in Table 1, such that the variant comprises at least one mutated protease cleavage site in place of a native protease cleavage site found in the parent IFN-α 2; and the variant is administered orally to the patient in the first dose containing the first number of moles of the variant at the first dosing frequency, where the first number of moles is greater than 8.0×10⁻¹⁰ mol., or at least about 1.6×10⁻⁹ mol., or at least about 2.4×10⁻⁹ mol., or at least about 3.2×10⁻⁹ mol., or at least about 4.0×10⁻⁹ mol., or at least about 4.8×10⁻⁹ mol., or at least about 5.6×10⁻⁹ mol., or at least about 6.4×10⁻⁹ mol., or at least about 7.2×10⁻⁹ mol., or at least about 8.0×10⁻⁹ mol., or at least about 8.0×10⁻⁸ mol., and where the first dosing frequency is at least three times per week. Alternatively, the first dosing frequency is four times per week, five times per week, six times per week, once per day, twice per day, or three times per day.

[1103] In another aspect, where the hyperglycosylated or protease-resistant, hyperglycosylated polypeptide variant is a hyperglycosylated or protease-resistant, hyperglycosylated consensus IFN-α, a subject method provides for administering to an individual in need thereof a therapeutically effective amount of the hyperglycosylated or protease-resistant, hyperglycosylated consensus IFN-α in a method of treating a viral infection, e.g., a hepatitis C virus (HCV) infection. In some embodiments, the method generally comprises orally administering a hyperglycosylated or protease-resistant, hyperglycosylated polypeptide variant of a parent consensus IFN-α to an individual in need thereof in a first dose and at a first dosing frequency that is at least as frequent, or more frequent, than a second dosing frequency proven to be effective in a regimen for treatment of HCV infection comprising administering to an individual in need thereof a parenteral formulation of the parent consensus IFN-α in a second dose at the second dosing frequency, where the first dose comprises a first number of moles of the hyperglycosylated or protease-resistant, hyperglycosylated polypeptide variant that is greater than a second number of moles of the parent consensus IFN-α in the second dose.

[1104] In one non-limiting example, the parent interferon alfacon-1 is proven to be effective in the treatment of HCV infection in a method comprising administering to a patient in need thereof 9 million units (or 9 micrograms) of INFERGEN® interferon alfacon-1 by subcutaneous bolus injection three times per week for 48 weeks. In some of these embodiments, the hyperglycosylated or protease-resistant, hyperglycosylated polypeptide variant of the parent interferon alfacon-1 can be, e.g., selected from the group of the [D102N]interferon alfacon-1, [D102N, D108N]interferon alfacon-1, [D102N, D108N, E138N] interferon alfacon-1, [D108N, E 138N] interferon alfacon-1, [E138N]interferon alfacon-1, and [D102N, E138N] interferon alfacon-1 glycopeptides (where the amino acid numbering is as set forth in FIG. 24); where the glycopeptide further comprises one or more single amino acid replacements at one or more target positions corresponding to any of amino acid positions: 41, 58, 78, 107, 117, 125, 133 and 159 (where the amino acid numbering is as set forth in FIG. 9), such that the variant comprises at least one mutated protease cleavage site in place of a native protease cleavage site found in the parent consensus IFN-α; and administered orally to the patient in the first dose containing the first number of moles of the hyperglycosylated or protease-resistant, hyperglycosylated polypeptide variant at the first dosing frequency, where the first number of moles is greater than the number of moles of interferon alfacon-1 in 9 million units (or 9 micrograms) of interferon alfacon-1, and where the first dosing frequency is at least three times per week. Alternatively, the first dosing frequency is four times per week, five times per week, six times per week, once per day, twice per day, or three times per day.

[1105] In another non-limiting example, the parent interferon alfacon-1 is proven to be effective in the treatment of HCV infection in a method comprising administering to a patient in need thereof 15 million units (or 15 micrograms) of INFERGEN® interferon alfacon-1 by subcutaneous bolus injection three times per week for 48 weeks. In some of these embodiments, the hyperglycosylated or protease-resistant, hyperglycosylated polypeptide variant of the parent interferon alfacon-1 can be, e.g., selected from the group of the [D102N]interferon alfacon-1, [D102N, D108N]interferon alfacon-1, [D102N, D108N, E138N] interferon alfacon-1, [D108N, E138N] interferon alfacon-1, [E138N]interferon alfacon-1, and [D102N, E138N]interferon alfacon-1 glycopeptides (where the amino acid numbering is as set forth in FIG. 24); where the glycopeptide further comprises one or more single amino acid replacements at one or more target positions corresponding to any of amino acid positions: 41, 58, 78, 107, 117, 125, 133 and 159 (where the amino acid numbering is as set forth in FIG. 9), such that the variant comprises at least one mutated protease cleavage site in place of a native protease cleavage site found in the parent consensus IFN-α; and administered orally to the patient in the first dose containing the first number of moles of the hyperglycosylated or protease-resistant, hyperglycosylated polypeptide variant at the first dosing frequency, where the first number of moles is greater than the number of moles of interferon alfacon-1 in 15 million units (or 15 micrograms) of interferon alfacon-1, and where the first dosing frequency is at least three times per week. Alternatively, the first dosing frequency is four times per week, five times per week, six times per week, once per day, twice per day, or three times per day.

[1106] In another non-limiting example, the parent interferon alfacon-1 is proven to be effective in the treatment of HCV infection in a method comprising administering to a patient in need thereof 9 micrograms (or 4.6×10⁻¹⁰ mol.) of interferon alfacon-1 by subcutaneous bolus injection three times per week for 48 weeks. In some of these embodiments, the hyperglycosylated or protease-resistant, hyperglycosylated polypeptide variant of the parent interferon alfacon-1 can be, e.g., selected from the group of the [D102N]interferon alfacon-1, [D102N, D108N]interferon alfacon-1, [D102N, D108N, E138N]interferon alfacon-1, [D108N, E138N]interferon alfacon-1, [E138N]interferon alfacon-1, and [D102N, E138N]interferon alfacon-1 glycopeptides (where the amino acid numbering is as set forth in FIG. 24); where the glycopeptide further comprises one or more single amino acid replacements at one or more target positions corresponding to any of amino acid positions: 41, 58, 78, 107, 117, 125, 133 and 159 (where the amino acid numbering is as set forth in FIG. 9), such that the variant comprises at least one mutated protease cleavage site in place of a native protease cleavage site found in the parent consensus IFN-α; and administered orally to the patient in the first dose containing the first number of moles of the hyperglycosylated or protease-resistant, hyperglycosylated polypeptide variant at the first dosing frequency, where the first number of moles is greater than 4.6×10⁻¹⁰ mol., or at least about 9.2×10⁻¹⁰ mol., or at least about 1.4×10⁻⁹ mol., or at least about 1.8×10⁻⁹ mol., or at least about 2.3×10⁻⁹ mol., or at least about 2.8×10⁻⁹ mol., or at least about 3.2×10⁻⁹ mol., or at least about 3.7×10⁻⁹ mol., or at least about 4.1×10⁻⁹ mol., or at least about 4.6×10⁻⁹ mol., or at least about 4.6×10⁻⁸ mol., and where the first dosing frequency is at least three times per week. Alternatively, the first dosing frequency is four times per week, five times per week, six times per week, once per day, twice per day, or three times per day.

[1107] In another non-limiting example, the parent interferon alfacon-1 is proven to be effective in the treatment of HCV infection in a method comprising administering to a patient in need thereof 15 micrograms (or 7.6×10⁻¹⁰ mol.) of interferon alfacon-1 by subcutaneous bolus injection three times per week for 48 weeks. In some of these embodiments, the hyperglycosylated or protease-resistant, hyperglycosylated polypeptide variant of the parent interferon alfacon-1 can be, e.g., selected from the group of the [D102N]interferon alfacon-1, [D102N, D108N]interferon alfacon-1, [D102N, D108N, E138N]interferon alfacon-1, [D108N, E138N]interferon alfacon-1, [E138N]interferon alfacon-1, and [D102N, E138N]interferon alfacon-1 glycopeptides, where the glycopeptide further comprises one or more single amino acid replacements at one or more target positions corresponding to any of amino acid positions: 41, 58, 78, 107, 117, 125, 133 and 159, such that the variant comprises at least one mutated protease cleavage site in place of a native protease cleavage site found in the parent consensus IFN-α; and administered orally to the patient in the first dose containing the first number of moles of the hyperglycosylated or protease-resistant, hyperglycosylated polypeptide variant at the first dosing frequency, where the first number of moles is greater than 7.6×10⁻¹⁰ mol., or at least about 1.5×10⁻⁹ mol., or at least about 2.3×10⁻⁹ mol., or at least about 3.0×10⁻⁹ mol., or at least about 3.8×10⁻⁹ mol., or at least about 4.6×10⁻⁹ mol., or at least about 5.3×10⁻⁹ mol., or at least about 6.1×10⁻⁹ mol., or at least about 6.8×10⁻⁹ mol., or at least about 7.6×10⁻⁹ mol., or at least about 7.6×10⁻⁸ mol., and where the first dosing frequency is at least three times per week. Alternatively, the first dosing frequency is four times per week, five times per week, six times per week, once per day, twice per day, or three times per day.

[1108] In another non-limiting example, the parent interferon alfacon-1 is proven to be effective in the treatment of HCV infection in a method comprising administering to a patient in need thereof 9 micrograms (or 4.5×10⁻⁸ mol.) of interferon alfacon-1 by subcutaneous bolus injection once per day for 48 weeks. In some of these embodiments, the hyperglycosylated or protease-resistant, hyperglycosylated polypeptide variant of the parent interferon alfacon-1 can be, e.g., selected from the group of the [D102N]interferon alfacon-1, [D102N, D108N]interferon alfacon-1, [D102N, D108N, E138N]interferon alfacon-1, [D108N, E138N]interferon alfacon-1, [E138N]interferon alfacon-1, and [D102N, E138N]interferon alfacon-1 glycopeptides, where the glycopeptide further comprises one or more single amino acid replacements at one or more target positions corresponding to any of amino acid positions: 41, 58, 78, 107, 117, 125, 133 and 159, such that the variant comprises at least one mutated protease cleavage site in place of a native protease cleavage site found in the parent consensus IFN-α; and administered orally to the patient in the first dose containing the first number of moles of the hyperglycosylated or protease-resistant, hyperglycosylated polypeptide variant at the first dosing frequency, where the first number of moles is greater than 4.6×10⁻¹⁰ mol., or at least about 9.2×10⁻¹⁰ mol., or at least about 1.4×10⁻⁹ mol., or at least about 1.8×10⁻⁹ mol., or at least about 2.3×10⁻⁹ mol., or at least about 2.8×10⁻⁹ mol., or at least about 3.2×10⁻⁹ mol., or at least about 3.7×10⁻⁹ mol., or at least about 4.1×10⁻⁹ mol., or at least about 4.6×10⁻⁹ mol., or at least about 4.6×10⁻⁸ mol., and where the first dosing frequency is at least once per day. Alternatively, the first dosing frequency is twice per day or three times per day.

[1109] In another non-limiting example, the parent interferon alfacon-1 is proven to be effective in the treatment of HCV infection in a method comprising administering to a patient in need thereof 15 micrograms (or 7.5×10⁻⁸ mol.) of interferon alfacon-1 by subcutaneous bolus injection once per day for 48 weeks. In some of these embodiments, the hyperglycosylated or protease-resistant, hyperglycosylated polypeptide variant of the parent interferon alfacon-1 can be, e.g., selected from the group of the [D102N]interferon alfacon-1, [D102N, D108N]interferon alfacon-1, [D102N, D108N, E138N]interferon alfacon-1, [D108N, E138N]interferon alfacon-1, [E138N]interferon alfacon-1, and [D102N, E138N]interferon alfacon-1 glycopeptides, where the glycopeptide further comprises one or more single amino acid replacements at one or more target positions corresponding to any of amino acid positions: 41, 58, 78, 107, 117, 125, 133 and 159, such that the variant comprises at least one mutated protease cleavage site in place of a native protease cleavage site found in the parent consensus IFN-α; and administered orally to the patient in the first dose containing the first number of moles of the hyperglycosylated or protease-resistant, hyperglycosylated polypeptide variant at the first dosing frequency, where the first number of moles is greater than 7.6×10⁻¹⁰ mol., or at least about 1.5×10⁻⁹ mol., or at least about 2.3×10⁻⁹ mol., or at least about 3.0×10⁻⁹ mol., or at least about 3.8×10⁻⁹ mol., or at least about 4.6×10⁻⁹ mol., or at least about 5.3×10⁻⁹ mol., or at least about 6.1×10⁻⁹ mol., or at least about 6.8×10⁻⁹ mol., or at least about 7.6×10⁻⁹ mol., or at least about 7.6×10⁻⁸ mol., and where the first dosing frequency is at least once per day. Alternatively, the first dosing frequency is twice per day or three times per day.

[1110] In some embodiments, the invention provides any of the foregoing methods of treating HCV infection with a hyperglycosylated or protease-resistant, hyperglycosylated polypeptide variant of a consensus IFN-α, in which the hyperglycosylated or protease-resistant, hyperglycosylated polypeptide variant comprises any of the carrier peptides described in Table 9 above in a covalent or non-covalent association with the desired polypeptide variant. In some of these embodiments, the hyperglycosylated or protease-resistant, hyperglycosylated polypeptide variant comprises any such carrier peptide in a direct or indirect covalent linkage with the desired polypeptide variant, including without limitation any such carrier peptide fused to the N-terminus of the desired polypeptide variant.

Treatment Methods Using IFN-γ

[1111] In another aspect, where the hyperglycosylated or protease-resistant, hyperglycosylated polypeptide variant is a hyperglycosylated IFN-γ, a subject method provides for administering to an individual in need thereof a therapeutically effective amount of a hyperglycosylated or protease-resistant, hyperglycosylated IFN-γ in a method of treating a viral infection, e.g., an HCV infection. In some embodiments, the method generally comprises orally administering a hyperglycosylated or protease-resistant, hyperglycosylated polypeptide variant of a parent IFN-γ to an individual in need thereof in a first dose at a first dosing frequency that is at least as frequent, or more frequent, than a second dosing frequency proven to be effective in a regimen for treatment of HCV infection comprising administering to an individual in need thereof a therapeutically effective amount of an IFN-α and co-administering to the individual a parenteral formulation of the parent IFN-γ in a second dose at the second dosing frequency, where the first dose comprises a first number of moles of the hyperglycosylated or protease-resistant, hyperglycosylated polypeptide variant that is greater than a second number of moles of the parent IFN-γ in the second dose.

[1112] In one non-limiting example, the parent IFN-γ is IFN-γ 1b and is proven to be effective in the treatment of HCV infection in a method comprising administering to a patient in need thereof a therapeutically effective amount of an IFN-α and co-administering to the patient 100 micrograms (6.0×10⁻⁹ mol.) of IFN-γ 1b by subcutaneous bolus injection three times per week for 48 weeks. In some of these embodiments, the hyperglycosylated or protease-resistant, hyperglycosylated polypeptide variant of the parent IFN-γ 1b can be, e.g., selected from the group of the [S102T]IFN-γ, [E38N]IFN-γ, [E38N, S40T]IFN-γ, [E38N, S102T]IFN-γ, and [E38N, S40T, S102T]IFN-γ glycopeptides, where the glycopeptide variant further comprises one or more of the amino acid replacements set forth in Table 3 (IFN-γ), such that the glycopeptide variant comprises at least one mutated protease cleavage site in place of a native protease cleavage site found in the parent IFN-γ polypeptide; and administered orally to the patient in the first dose containing the first number of moles of the hyperglycosylated or protease-resistant, hyperglycosylated polypeptide variant at the first dosing frequency, where the first number of moles is greater than the number of moles of IFN-γ 1b in 100 micrograms (6.0×10⁻⁹ mol.) of IFN-γ 1b, and where the first dosing frequency is at least three times per week. Alternatively, the first dosing frequency is four times per week, five times per week, six times per week, once per day, twice per day, or three times per day.

[1113] In another non-limiting example, the parent IFN-γ is IFN-γ 1b and is proven to be effective in the treatment of HCV infection in a method comprising administering to a patient in need thereof a therapeutically effective amount of an IFN-α and co-administering to the patient 50 micrograms (3.0×10⁻⁹ mol.) of IFN-γ 1b by subcutaneous bolus injection three times per week for 48 weeks. In some of these embodiments, the hyperglycosylated or protease-resistant, hyperglycosylated polypeptide variant of the parent IFN-γ 1b can be, e.g., selected from the group of the [S102T]IFN-γ, [E38N]IFN-γ, [E38N, S40T]IFN-γ, [E38N, S102T]IFN-γ, and [E38N, S40T, S102T]IFN-γ glycopeptides, where the glycopeptide variant further comprises one or more of the amino acid replacements set forth in Table 3 (IFN-γ), such that the glycopeptide variant comprises at least one mutated protease cleavage site in place of a native protease cleavage site found in the parent IFN-γ polypeptide; and administered orally to the patient in the first dose containing the first number of moles of the hyperglycosylated or protease-resistant, hyperglycosylated polypeptide variant at the first dosing frequency, where the first number of moles is greater than the number of moles of IFN-γ 1b in 50 micrograms (3.0×10⁻⁹ mol.) of IFN-γ 1b, and where the first dosing frequency is at least three times per week. Alternatively, the first dosing frequency is four times per week, five times per week, six times per week, once per day, twice per day, or three times per day.

[1114] In another non-limiting example, the parent IFN-γ is IFN-γ 1b and is proven to be effective in the treatment of HCV infection in a method comprising administering to a patient in need thereof a therapeutically effective amount of an IFN-α and co-administering to the patient 100 micrograms (6.0×10⁻⁹ mol.) of IFN-γ 1b by subcutaneous bolus injection three times per week for 48 weeks. In some of these embodiments, the hyperglycosylated or protease-resistant, hyperglycosylated polypeptide variant of the parent IFN-γ 1b can be, e.g., selected from the group of the [S102T]IFN-γ, [E38N]IFN-γ, [E38N, S40T]IFN-γ, [E38N, S102T]IFN-γ, and [E38N, S40T, SI O₂T]IFN-γ glycopeptides, where the glycopeptide variant further comprises one or more of the amino acid replacements set forth in Table 3 (IFN-γ), such that the glycopeptide variant comprises at least one mutated protease cleavage site in place of a native protease cleavage site found in the parent IFN-γ polypeptide; and administered orally to the patient in the first dose containing the first number of moles of the hyperglycosylated or protease-resistant, hyperglycosylated polypeptide variant at the first dosing frequency, where the first number of moles is greater than 6.0×10⁻⁹ mol., or at least about 1.2×10⁻⁸ mol., or at least about 1.8×10⁻⁸ mol., or at least about 2.4×10⁻⁸ mol., or at least about 3.0×10⁻⁸ mol., or at least about 3.6×10⁻⁸ mol., or at least about 4.2×10⁻⁸ mol., or at least about 4.8×10⁻⁸ mol., or at least about 5.4×10⁻⁸ mol., or at least about 6.0×10⁻⁸ mol., or at least about 6.0×10⁻⁷ mol., and where the first dosing frequency is at least three times per week. Alternatively, the first dosing frequency is four times per week, five times per week, six times per week, once per day, twice per day, or three times per day.

[1115] In another non-limiting example, the parent IFN-γ is IFN-γ 1b and is proven to be effective in the treatment of HCV infection in a method comprising administering to a patient in need thereof a therapeutically effective amount of an IFN-α and co-administering to the patient 50 micrograms (3.0×10⁻⁹ mol.) of IFN-γ 1b by subcutaneous bolus injection three times per week for 48 weeks. In some of these embodiments, the hyperglycosylated or protease-resistant, hyperglycosylated polypeptide variant of the parent IFN-γ 1b can be, e.g., selected from the group of the [S102T]IFN-γ, [E38N]IFN-γ, [E38N, S40T]IFN-γ, [E38N, S102T]IFN-γ, and [E38N, S40T, S102T]IFN-γ glycopeptides, where the glycopeptide variant further comprises one or more of the amino acid replacements set forth in Table 3 (IFN-γ), such that the glycopeptide variant comprises at least one mutated protease cleavage site in place of a native protease cleavage site found in the parent IFN-γ polypeptide; and administered orally to the patient in the first dose containing the first number of moles of the hyperglycosylated or protease-resistant, hyperglycosylated polypeptide variant at the first dosing frequency, where the first number of moles is greater than 3.0×10⁻⁹ mol., or at least about 6.0×10⁻⁹ mol., or at least about 9.0×10⁻⁹ mol., or at least about 1.2×10⁻⁸ mol., or at least about 1.5×10⁻⁸ mol., or at least about 1.8×10⁻⁸ mol., or at least about 2.1×10⁻⁸ mol., or at least about 2.4×10⁻⁸ mol., or at least about 2.7×10⁻⁸ mol., or at least about 3.0×10⁻⁸ mol., or at least about 3.0×10⁻⁷ mol., and where the first dosing frequency is at least three times per week. Alternatively, the first dosing frequency is four times per week, five times per week, six times per week, once per day, twice per day, or three times per day.

[1116] In some embodiments, the invention provides any of the foregoing methods of treating HCV infection with a hyperglycosylated or protease-resistant, hyperglycosylated polypeptide variant of a IFN-γ, in which the hyperglycosylated or protease-resistant, hyperglycosylated polypeptide variant comprises any of the carrier peptides described in Table 9 above in a covalent or non-covalent association with the desired polypeptide variant. In some of these embodiments, the hyperglycosylated or protease-resistant, hyperglycosylated polypeptide variant comprises any such carrier peptide in a direct or indirect covalent linkage with the desired polypeptide variant, including without limitation any such carrier peptide fused to the N-terminus of the desired polypeptide variant.

[1117] Therapeutically effective amounts of IFN-α suitable for use in the present methods of treating HCV infection with IFN-α and IFN-γ combination therapy are provided in the methods for treating HCV infection with IFN-α therapy described under the heading “Treatment Methods Using IFN-α” above. In addition, therapeutically effective amounts of IFN-α suitable for use in the present methods of treating HCV infection with IFN-α and IFN-γ combination therapy are provided in the methods for treating HCV infection with IFN-α and IFN-γ combination therapy described in WO 03/030613.

[1118] In another aspect, where the hyperglycosylated or protease-resistant, hyperglycosylated polypeptide variant is a hyperglycosylated IFN-γ, a subject method provides for administering to an individual in need thereof a therapeutically effective amount of a hyperglycosylated or protease-resistant, hyperglycosylated IFN-γ in a method of treating a fibrotic disorder, e.g., a pulmonary fibrotic disorder or a liver fibrotic disorder. In some embodiments, the method generally comprises orally administering a hyperglycosylated or protease-resistant, hyperglycosylated polypeptide variant of a parent IFN-γ to an individual in need thereof in a first dose at a first dosing frequency that is at least as frequent, or more frequent, than a second dosing frequency proven to be effective in a regimen for treatment of the fibrotic disorder comprising administering to an individual in need thereof a parenteral pharmaceutical formulation of the parent IFN-γ in a second dose at the second dosing frequency, where the first dose comprises a first number of moles of the hyperglycosylated or protease-resistant, hyperglycosylated polypeptide variant that is greater than a second number of moles of the parent IFN-γ in the second dose.

[1119] In one non-limiting example, the parent IFN-γ is IFN-γ 1b and is proven to be effective in the treatment of a fibrotic disorder in a method comprising administering to a patient in need thereof 200 micrograms (1.2×10⁻⁸ mol.) of IFN-γ 1b by subcutaneous bolus injection three times per week for 1 year or more. In some of these embodiments, the hyperglycosylated or protease-resistant, hyperglycosylated polypeptide variant of the parent IFN-γ 1b can be, e.g., selected from the group of the [S102T]IFN-γ, [E38N]IFN-γ, [E38N, S40T]IFN-γ, [E38N, S102T]IFN-γ, and [E38N, S40T, S102T]IFN-γ glycopeptides, where the glycopeptide variant further comprises one or more of the amino acid replacements set forth in Table 3 (IFN-γ), such that the glycopeptide variant comprises at least one mutated protease cleavage site in place of a native protease cleavage site found in the parent IFN-γ polypeptide; and administered orally to the patient in the first dose containing the first number of moles of the hyperglycosylated or protease-resistant, hyperglycosylated polypeptide variant at the first dosing frequency, where the first number of moles is greater than 1.2×10⁻⁸ mol., or at least about 2.4×10⁻⁸ mol., or at least about 3.6×10⁻⁸ mol., or at least about 4.8×10⁻⁸ mol., or at least about 6.0×10⁻⁸ mol., or at least about 7.2×10⁻⁸ mol., or at least about 8.4×10⁻⁸ mol., or at least about 9.6×10⁻⁸ mol., or at least about 1.1×10⁻⁷ mol., or at least about 1.2×10⁻⁷ mol., or at least about 1.0×10⁻⁶ mol., and where the first dosing frequency is at least three times per week. Alternatively, the first dosing frequency, where the first dosing frequency is four times per week, five times per week, six times per week, once per day, twice per day, or three times per day.

[1120] In some embodiments, the invention provides any of the foregoing methods of treating a fibrotic disorder with a hyperglycosylated or protease-resistant, hyperglycosylated polypeptide variant of IFN-γ, where the fibrotic disorder is a pulmonary fibrotic disorder, such as idiopathic pulmonary fibrosis, or a liver fibrotic disorder. In some of the subject methods of treating idiopathic pulmonary fibrosis, the patient has an initial forced vital capacity (FVC)≧55% of the predicted normal FVC. In other methods of the invention for treating idiopathic pulmonary fibrosis, the patient has an initial carbon monoxide diffusing capacity (DL_{CO})≧35% of the predicted normal DL_{CO}. In still other methods of the invention for treating idiopathic pulmonary fibrosis, the patient has an initial forced vital capacity (FVC)≧55% of the predicted normal FVC and an initial carbon monoxide diffusing capacity (DL_{CO})≧35% of the predicted normal DL_{CO}.

[1121] In some embodiments, the invention provides any of the foregoing methods of treating a fibrotic disorder with a hyperglycosylated or protease-resistant, hyperglycosylated polypeptide variant of an IFN-γ, in which the hyperglycosylated or protease-resistant, hyperglycosylated polypeptide variant comprises any of the carrier peptides described in Table 9 above in a covalent or non-covalent association with the desired polypeptide variant. In some of these embodiments, the hyperglycosylated or protease-resistant, hyperglycosylated polypeptide variant comprises any such carrier peptide in a direct or indirect covalent linkage with the desired polypeptide variant, including without limitation any such carrier peptide fused to the N-terminus of the desired polypeptide variant.

[1122] In some embodiments, the invention provides any of the foregoing methods of treating a disease in a patient with a hyperglycosylated or protease-resistant, hyperglycosylated polypeptide variant of a parent IFN-γ 1b therapeutic, where the method is modified to use any protease-resistant variant of glycosylated native (wild-type) human IFN-γ (described in WO 02/081507) as the hyperglycosylated or protease-resistant, hyperglycosylated polypeptide-variant of the parent IFN-γ 1b therapeutic. In one non-limiting example, the protease-resistant variant of glycosylated native human IFN-γ comprises one or more of the amino acid replacements set forth in Table 3 (IFN-γ), such that the variant comprises at least one mutated protease cleavage site in place of a native protease cleavage site in the parent IFN-γ 1b polypeptide.

Treatment Methods Using IFN-β

[1123] In some embodiments, where the hyperglycosylated or protease-resistant, hyperglycosylated polypeptide variant is a hyperglycosylated or protease-resistant, hyperglycosylated IFN-β, a subject method provides for administering to an individual in need thereof a therapeutically effective amount of the hyperglycosylated or protease-resistant, hyperglycosylated IFN-β in a method of treating multiple sclerosis. The method generally comprises orally administering a hyperglycosylated or protease-resistant, hyperglycosylated polypeptide variant of a parent IFN-β to an individual in need thereof in a first dose at a first dosing frequency that is at least as frequent, or more frequent, than a second dosing frequency proven to be effective in a regimen for treatment of multiple sclerosis comprising administering to an individual in need thereof a parenteral formulation of the parent IFN-β in a second dose at the second dosing frequency, where the first dose comprises a first number of moles of the hyperglycosylated or protease-resistant, hyperglycosylated polypeptide variant that is greater than a second number of moles of the parent IFN-β in the second dose.

[1124] In one non-limiting example, the parent IFN-β1 therapeutic is IFN-β1b and is proven to be effective in the treatment of multiple sclerosis in a method comprising administering to a patient in need thereof 0.25 mg (or 1.35×10⁻⁸ mol.) IFN-β1b (BETASERON®) by subcutaneous bolus injection every other day for the desired treatment duration. In some of these embodiments, the hyperglycosylated or protease-resistant, hyperglycosylated polypeptide variant is a known protease-resistant variant of the active ingredient of AVONEX® IFN-β1a, (e.g., where the protease-resistant variant comprises one or more of the amino acid changes set forth in Table 2) and is administered orally to the patient in the first dose containing the first number of moles of the variant at the first dosing frequency, where the first number of moles is greater than 1.35×10⁻⁸ mol., or at least about 2.7×10⁻⁸ mol., or at least about 4.0×10⁻⁸ mol., or at least about 5.4×10⁻⁸ mol., or at least about 6.75×10⁻⁸ mol., or at least about 8.1×10⁻⁸ mol., or at least about 9.45×10⁻⁸ mol., or at least about 1.1×10⁻⁷ mol., or at least about 1.2×10⁻⁷ mol., or at least about 1.35×10⁻⁷ mol., or at least about 1.35×10⁻⁶ mol., and where the first dosing frequency is at least every other day. Alternatively, the first dosing frequency is four times per week, five times per week, six times per week, once per day, twice per day, or three times per day.

Treatment Methods Using Erythropoietin (EPO)

[1125] In some embodiments, where the hyperglycosylated or protease-resistant, hyperglycosylated polypeptide variant is a hyperglycosylated or protease-resistant, hyperglycosylated EPO, a subject method provides for administering to an individual in need thereof a therapeutically effective amount of a hyperglycosylated or protease-resistant, hyperglycosylated EPO in a method of treating anemia. The method generally comprises orally administering a hyperglycosylated or protease-resistant, hyperglycosylated polypeptide variant of a parent EPO to an individual in need thereof in a first dose at a first dosing frequency that is at least as frequent, or more frequent, than a second dosing frequency proven to be effective in a regimen for treatment of anemia comprising administering to an individual in need thereof a parenteral formulation of the parent EPO in a second dose at the second dosing frequency, where the first dose comprises a first number of moles of the hyperglycosylated or protease-resistant, hyperglycosylated polypeptide variant that is greater than a second number of moles of the parent EPO in the second dose.

[1126] In one non-limiting example, the parent EPO is proven to be effective in the treatment of anemia in a method comprising administering to a patient in need thereof 100 Units (770 micrograms or 2.5×10⁻⁸ mol.) EPOGEN® epoetin alfa per kilogram of patient body weight by subcutaneous bolus injection three times per week for the desired treatment duration. In some of these embodiments, the hyperglycosylated or protease-resistant, hyperglycosylated polypeptide variant is a protease-resistant variant of the active ingredient of ARANESP® darbepoetin alfa, (e.g., where the protease-resistant or protease-resistant, hyperglycosylated variant comprises one or more of the amino acid changes set forth in Table 4) and administered orally to the patient in the first dose containing the first number of moles of the variant at the first dosing frequency, where the first number of moles is the product of greater than 2.5×10⁻⁸ mol., or at least about 5.0×10⁻⁸ mol., or at least about 7.5×10⁻⁸ mol., or at least about 1.0×10⁻⁷ mol., or at least about 1.25×10⁻⁷ mol., or at least about 1.5×10⁻⁷ mol., or at least about 1.75×10⁻⁷ mol., or at least about 2.0×10⁻⁷ mol., or at least about 2.25×10⁻⁷ mol., or at least about 2.5×10⁻⁷ mol., or at least about 2.5×10⁻⁶ mol., per kilogram of the patient's body weight multiplied by the patient's body weight, and where the first dosing frequency is at least three times per week. Alternatively, the first dosing frequency is four times per week, five times per week, six times per week, once per day, twice per day, or three times per day.

[1127] In another non-limiting example, the parent EPO is proven to be effective in the treatment of anemia in a method comprising administering to a patient in need thereof 50 Units (385 micrograms or 1.25×10⁻⁸ mol.) EPOGEN® epoetin alfa per kilogram of patient body weight by subcutaneous bolus injection three times per week for the desired treatment duration. In some of these embodiments, the hyperglycosylated or protease-resistant, hyperglycosylated polypeptide variant is a known protease-resistant variant of the active ingredient of ARANESP® darbepoetin alfa, (e.g., where the protease-resistant or protease-resistant, hyperglycosylated variant comprises one or more of the amino acid changes set forth in Table 4) and is administered orally to the patient in the first dose containing the first number of moles of the variant at the first dosing frequency, where the first number of moles is the product of greater than 1.25×10⁻⁸ mol., or at least about 2.5×10⁻⁸ mol., or at least about 3.75×10⁻⁸ mol., or at least about 5.0×10⁻⁸ mol., or at least about 6.25×10⁻⁸ mol., or at least about 7.5×10⁻⁸ mol., or at least about 8.75×10⁻⁸ mol., or at least about 1.0×10⁻⁷ mol., or at least about 1.125×10⁻⁷ mol., or at least about 1.25×10⁻⁷ mol., or at least about 1.25×10⁻⁶ mol., per kilogram of the patient's body weight multiplied by the patient's body weight, and where the first dosing frequency is at least three time per week. Alternatively, the first dosing frequency is four times per week, five times per week, six times per week, once per day, twice per day, or three times per day.

Treatment Methods Using Parenterally—Administered Hyperglycosylated Type I Interferon Variants for Acute Viral Infection or for Cancer

[1128] In some embodiments, where the hyperglycosylated or protease-resistant, hyperglycosylated polypeptide variant is a hyperglycosylated or protease-resistant, hyperglycosylated Type 1 interferon, a subject method provides for administering to an individual in need thereof a therapeutically effective amount of a hyperglycosylated or protease-resistant, hyperglycosylated polypeptide variant parenterally, especially by intravenous administration. Such an administration is useful to ensure a controlled setting during therapeutic dosing thus affording greater patient compliance with dosing regimens and more effective management of acute side effects. Such an administration is useful in management of acute viral infection, particularly in epidemic or pandemic viral infections, as a single dose or a minimal number of doses is designated for treatment.

[1129] In another non-limiting example, the parent interferon alfacon-1 is proven to be effective in the treatment of acute viral infection in a method comprising administering to a patient in need thereof 9 micrograms (or 4.5×10⁻⁸ mol.) of interferon alfacon-1 by parenteral, especially intravenous, bolus injection one time.

[1130] In another non-limiting example, the parent interferon alfacon-1 is proven to be effective in the treatment of acute viral infection in a method comprising administering to a patient in need thereof 9 micrograms (or 4.5×10⁻⁸ mol.) of interferon alfacon-1 by parenteral, especially intravenous, bolus injection daily for not more than seven days.

[1131] In another non-limiting example, the parent interferon alfacon-1 is proven to be effective in the treatment of acute viral infection in a method comprising administering to a patient in need thereof 9 micrograms (or 4.5×10⁻⁸ mol.) of interferon alfacon-1 by parenteral, especially intravenous, bolus injection daily for not more than 14 days.

[1132] In another non-limiting example, the parent interferon alfacon-1 is proven to be effective in the treatment of acute viral infection in a method comprising administering to a patient in need thereof 9 micrograms (or 4.5×10⁻⁸ mol.) of interferon alfacon-1 by parenteral, especially intravenous, bolus injection daily for not more than 21 days.

[1133] In another non-limiting example, the parent interferon alfacon-1 is proven to be effective in the treatment of acute viral infection in a method comprising administering to a patient in need thereof 15 micrograms (or 7.5×10⁻⁸ mol.) of interferon alfacon-1 by parenteral, especially intravenous, bolus injection one time.

[1134] In another non-limiting example, the parent interferon alfacon-1 is proven to be effective in the treatment of acute viral infection in a method comprising administering to a patient in need thereof 15 micrograms (or 7.5×10⁻⁸ mol.) of interferon alfacon-1 by parenteral, especially intravenous, bolus injection daily for not more than 7 days.

[1135] In another non-limiting example, the parent interferon alfacon-1 is proven to be effective in the treatment of acute viral infection in a method comprising administering to a patient in need thereof 15 micrograms (or 7.5×10⁻⁸ mol.) of interferon alfacon-1 by parenteral, especially intravenous, bolus injection daily for not more than 14 days.

[1136] In another non-limiting example, the parent interferon alfacon-1 is proven to be effective in the treatment of acute viral infection in a method comprising administering to a patient in need thereof 15 micrograms (or 7.5×10⁻⁸ mol.) of interferon alfacon-1 by parenteral, especially intravenous, bolus injection daily for not more than 21 days.

[1137] In another non-limiting example, the parent interferon alfacon-1 is proven to be effective in the treatment of acute viral infection in a method comprising administering to a patient in need thereof more than 15 micrograms (or 7.5×10⁻⁸ mol.) of interferon alfacon-1 by parenteral, especially intravenous, bolus injection one time.

[1138] In another non-limiting example, the parent interferon alfacon-1 is proven to be effective in the treatment of acute viral infection in a method comprising administering to a patient in need thereof more than 15 micrograms (or 7.5×10⁻⁸ mol.) of interferon alfacon-1 by parenteral, especially intravenous, bolus injection for not more than 7 days.

[1139] In another non-limiting example, the parent interferon alfacon-1 is proven to be effective in the treatment of acute viral infection in a method comprising administering to a patient in need thereof more than 15 micrograms (or 7.5×10⁻⁸ mol.) of interferon alfacon-1 by parenteral, especially intravenous, bolus injection for not more than 14 days.

[1140] In another non-limiting example, the parent interferon alfacon-1 is proven to be effective in the treatment of acute viral infection in a method comprising administering to a patient in need thereof more than 15 micrograms (or 7.5×10⁻⁸ mol.) of interferon alfacon-1 by parenteral, especially intravenous, bolus injection for not more than 21 days.

Kits and Containers

[1141] The present invention provides a container comprising a hyperglycosylated or protease-resistant, hyperglycosylated polypeptide variant. The invention further provides a kit comprising a formulation comprising a unit dosage form of a hyperglycosylated or protease-resistant, hyperglycosylated polypeptide variant in a container, and a label that provides instructions for use of the kit.

[1142] Suitable containers include those adapted for administration by subcutaneous injection, including a syringe (for use with a needle), an injector pen, and the like. In some embodiments, a subject agonist is administered with a pen injector (e.g., a medication delivery pen), a number of which are known in the art. Exemplary devices which can be adapted for use in the present methods are any of a variety of pen injectors from Becton Dickinson, e.g., BD™ Pen, BD™ Pen II, BD™ Auto-Injector; a pen injector from Innoject, Inc.; any of the medication delivery pen devices discussed in U.S. Pat. Nos. 5,728,074, 6,096,010, 6,146,361, 6,248,095, 6,277,0102, and 6,221,053; and the like. The medication delivery pen can be disposable, or reusable and refillable. Also suitable for use is an Intraject® needle-free injection system (Aradigm Corp.).

[1143] The invention further provides a drug delivery device comprising (e.g., pre-loaded with) a reservoir containing a liquid formulation that comprises a single dose of a subject glycosylated synthetic Type I interferon receptor polypeptide agonist. In some embodiments, the present invention provides a pre-filled syringe comprising a pharmaceutical composition comprising a subject glycosylated synthetic Type I interferon receptor polypeptide agonist.

[1144] The present invention provides formulations comprising a subject glycosylated synthetic Type I interferon receptor polypeptide agonist and a glycosylated IFN-γ in a single liquid formulation that is contained in a single reservoir, for use in a drug delivery device. In some aspects, the present invention provides a drug reservoir or other container containing a subject glycosylated synthetic Type I interferon receptor polypeptide agonist and a glycosylated IFN-γ co-formulated in a liquid, wherein both the subject glycosylated synthetic Type I interferon receptor polypeptide agonist and glycosylated IFN-γ are present in the formulation in an amount suitable for one dose each. The reservoir can be provided in any of a variety of forms, including, but not limited to, a cartridge, a syringe, a reservoir of a continuous delivery device, and the like.

[1145] The invention further provides a drug delivery device comprising (e.g., pre-loaded with) a reservoir containing a liquid formulation that comprises a single dose of a subject glycosylated synthetic Type I interferon receptor polypeptide agonist and a single dose of glycosylated IFN-γ. Exemplary, non-limiting drug delivery devices include injections devices, such as pen injectors, needle/syringe devices, continuous delivery devices, and the like. Any of the dosage amounts, including synergistically effective amounts, described herein can be used in the pharmaceutical formulation, in the reservoir, or in the drug delivery device.

[1146] In some embodiments, the present invention provides a pre-filled syringe comprising a pharmaceutical composition comprising a subject glycosylated synthetic Type I interferon receptor polypeptide agonist, a glycosylated IFN-γ, and a pharmaceutically acceptable excipient, where the subject glycosylated synthetic Type I interferon receptor polypeptide agonist and the glycosylated IFN-γ are co-formulated.

[1147] In other embodiments, the present invention provides a syringe comprising (a) a first barrel pre-filled with a pharmaceutical composition comprising a subject glycosylated synthetic Type I interferon receptor polypeptide agonist; (b) a second barrel pre-filled with a pharmaceutical composition comprising a glycosylated IFN-γ.

[1148] In some embodiments, the present invention provides a container comprising a hyperglycosylated or protease-resistant, hyperglycosylated polypeptide variant in a formulation suitable for oral delivery. Formulations suitable for oral delivery include liquid formulations, solid formulations (e.g., tablets, capsules, and the like), and semi-solid formulations (e.g., gels, gel capsules, etc.).

Subjects Suitable for Treatment

[1149] The subject methods are suitable for treating individuals having, or susceptible to having, a variety of disorders. In many embodiments, the individual is a human.

Fibrotic Disorders

[1150] The subject methods for treating fibrotic disorders are suitable for treatment of individuals diagnosed as having a fibrotic disorder. Fibrotic disorders include, but are not limited to, pulmonary fibrosis, including idiopathic pulmonary fibrosis (IPF) and pulmonary fibrosis from a known etiology, liver fibrosis, and renal fibrosis. Other exemplary fibrotic conditions include musculoskeletal fibrosis, cardiac fibrosis, post-surgical adhesions, scleroderma, glaucoma, and skin lesions such as keloids.

Cancer

[1151] Subjects suitable for treatment with a subject method for treating cancer include individuals having any type of cancer. Also suitable for treatment are individuals who have failed previous treatment for a cancer with a standard cancer chemotherapeutic agent. Also suitable for treatment are individuals who have been previously treated with a standard cancer chemotherapeutic agent, who initially responded to such treatment, and in whom the cancer subsequently reappeared. Also suitable for treatment are individuals who failed to respond to treatment with another agent for treating cancer. Also suitable for treatment are individuals who failed to comply with dosing regimens required for treatment with interferon therapeutics or another agent for treating cancer. Also suitable for treatment are individuals who require management of acute side effects of chemotherapeutic regimens for treating cancer.

HCV Infection

[1152] Individuals who are to be treated according to the methods of the invention for treating an HCV infection include individuals who have been clinically diagnosed as infected with HCV. Individuals who are infected with HCV are identified as having HCV RNA in their blood, and/or having anti-HCV antibody in their serum.

[1153] Individuals who are clinically diagnosed as infected with HCV include naïve individuals (e.g., individuals not previously treated for HCV, particularly those who have not previously received IFN-α-based and/or ribavirin-based therapy) and individuals who have failed prior treatment for HCV (“treatment failure” patients). Treatment failure patients include non-responders (i.e., individuals in whom the HCV titer was not significantly or sufficiently reduced by a previous treatment for HCV, e.g., a previous IFN-α monotherapy, a previous IFN-α and ribavirin combination therapy, or a previous pegylated IFN-α and ribavirin combination therapy); and relapsers (i.e., individuals who were previously treated for HCV, e.g., who received a previous IFN-α monotherapy, a previous IFN-α and ribavirin combination therapy, or a previous pegylated IFN-α and ribavirin combination therapy, whose HCV titer decreased, and subsequently increased).

[1154] In particular embodiments of interest, individuals have an HCV titer of at least about 105, at least about 5×105, or at least about 10⁶, or at least about 2×10⁶, genome copies of HCV per milliliter of serum. The patient may be infected with any HCV genotype (genotype 1, including 1a and 1b, 2, 3, 4, 6, etc. and subtypes (e.g., 2a, 2b, 3a, etc.)), particularly a difficult to treat genotype such as HCV genotype 1 and particular HCV subtypes and quasispecies.

[1155] Also of interest are HCV-positive individuals (as described above) who exhibit severe fibrosis or early cirrhosis (non-decompensated, Child's-Pugh class A or less), or more advanced cirrhosis (decompensated, Child's-Pugh class B or C) due to chronic HCV infection and who are viremic despite prior anti-viral treatment with IFN-α-based therapies or who cannot tolerate IFN-α-based therapies, or who have a contraindication to such therapies. In particular embodiments of interest, HCV-positive individuals with stage 3 or 4 liver fibrosis according to the METAVIR scoring system are suitable for treatment with the methods of the present invention. In other embodiments, individuals suitable for treatment with the methods of the instant invention are patients with decompensated cirrhosis with clinical manifestations, including patients with far-advanced liver cirrhosis, including those awaiting liver transplantation. In still other embodiments, individuals suitable for treatment with the methods of the instant invention include patients with milder degrees of fibrosis including those with early fibrosis (stages 1 and 2 in the METAVIR, Ludwig, and Scheuer scoring systems; or stages 1, 2, or 3 in the Ishak scoring system.).

### EXAMPLES

[1156] The following examples are put forth so as to provide those of ordinary skill in the art with a complete disclosure and description of how to make and use the present invention, and are not intended to limit the scope of what the inventors regard as their invention nor are they intended to represent that the experiments below are all or the only experiments performed. Efforts have been made to ensure accuracy with respect to numbers used (e.g. amounts, temperature, etc.) but some experimental errors and deviations should be accounted for. Unless indicated otherwise, parts are parts by weight, molecular weight is weight average molecular weight, temperature is in degrees Celsius, and pressure is at or near atmospheric. Standard abbreviations may be used, e.g., bp, base pair(s); kb, kilobase(s); pl, picoliter(s); s or sec, second(s); min, minute(s); h or hr, hour(s); aa, amino acid(s); kb, kilobase(s); bp, base pair(s); nt, nucleotide(s); i.m., intramuscular(ly); i.p., intraperitoneal(ly); s.c., subcutaneous(ly); and the like.

### Example 1

### Construction of hybrid Type I Interferon Receptor Polypeptide Agonists with Non-Native Glycosylation Sites

[1157] Among Type I interferons, two interferon alpha subtypes (IFN alpha 2b and 14), IFN beta 1 and IFN Omega 1 are naturally glycosylated in mammalian cells (FIG. 24). FIG. 24 provides an amino acid sequence comparison of the amino acid sequences of Infergen (SEQ ID NO:1356) and Type I Interferon species (SEQ ID NOs:1357-1360) that have been reported to be glycosylated naturally. The amino acid residues where the glycosylations occur are labeled with bold outlined boxes. The asparagines residues are the anchoring site for N-link glycosylation and the threonine residue is the anchoring site for O-link glycosylation. The majority sequence is shown above (SEQ ID NO:1355).

[1158] Based on the high degree of amino acid sequence identity between Infergen and other Type I interferons, glycosylation sites were designed in Infergen on the basis of amino acid sequence alignment of Infergen with the naturally glycosylated type I interferons (FIG. 25). FIG. 25 provides an amino acid sequence comparison of the amino acid sequences of amino acids 61-120 of Infergen (SEQ ID NO:1362) and various embodiments of subject glycosylated mutants (SEQ ID NOs:1363-1373). Sites 1, 2 and 3 are examples of positions where glycosylation sites are created. Only N-link glycosylation sites are generated at Sites 1 and 2. Both N-link and O-link glycosylation sites are generated at Site 3. N-linked and O-linked glycosylation sites were engineered into Infergen. N-linked glycosylation involves a unique oligosaccharide branch structure that is attached to an asparagine residue found in an Asn-X-Ser/Thr motif. O-linked glycosylation consists of an oligosaccharide chain or glycosaminoglycan chains added to the OH group of serine or threonine residues. A majority sequence is shown above (SEQ ID NO:1361).

Experimental Design

[1159] Designing an Infergen gene optimized for expression in human cells. Currently, Infergen is produced in E. coli and therefore contains codons optimized for bacterial expression. Glycosylated Infergen must be generated in mammalian cell lines. To increase the protein expression level in mammalian cells, a new Infergen gene with mammalian codon usage preference (Table 8) was designed and synthesized using the most frequent codon for each amino acid is selected (FIG. 26). FIG. 26 depicts an exemplary synthetic mammalian Infergen nucleic acid sequence with preferred mammalian codon usage. The open reading frame is indicated with translated Infergen amino acid sequence (SEQ ID NO:1356). Six pairs of complementary primers from A to F are shown in alternating italics and bold text. The upper sense strands of the primer pairs are identified with odd number and lower non-sense strands are identified with even number. In the region upstream of the start codon ATG, a short sequence of GCCACC, the Kozak consensus sequence, is designed to increase eukaryotic translation efficiency. Two tandem stop codons —TAA and TGA— are used to ensure complete termination of translation. Table 8 (above) provides mammalian codon usage preference. From, “Molecular Cloning: A Laboratory Manual” Sambrook J. and Russell D. W. Third Edition (2001) Cold Spring Harbor Press.

[1160] Strategies for construction of synthetic Mammalian Infergen gene. Since the new Mammalian Infergen DNA sequence is synthetic rather than naturally occurring, chemical synthesis of the gene is the reasonable route of synthesis. Typically chemical synthesis of a gene involves the synthesis short oligonucleotides, their annealing, ligation and cloning into a plasmid. A total of 6 pairs of oligonucleotides were used to produce a synthetic mammalian Infergen gene (FIG. 26).

[1161] Each pair of annealed primers has terminal sequence that allows it to anneal to the adjacent oligonucleotide. The 5′ and 3′ end of the synthetic gene contain Hind III and Eco RI restriction endonuclease sites, respectively, which allows ligation into the plasmid. Detailed sequence information of these primers is given (Table 11).

TABLE 11

Sequences of primers for chemical gene synthesis
of Mammalian Infergen.

| | | |
|---|---|---|
| Primer | Sense | Sequence (in 5′ to 3′ orientation |

| | |
|---|---|
| Yes | [Phosp] AGCTTGCCACCATGTGCGACCTGCCCCAGACCCA |
| | CAGCCTGGGCAACCGCCGCGCCCTGATCCTGCTGGCCC |
| | AGATGCGCCGCATCAGCCCC (SEQ ID NO:1338) |
| No | [Phosp] GCGGCGCATCTGGGCCAGCAGGATCAGGGCGCGGC |
| | GGTTGCCCAGGCTGTGGGTCTGGGGCAGGTCGCACAT |
| | GGTGGCA (SEQ ID NO:1339) |
| Yes | [Phosp] TTCAGCTGCCTGAAGGACCGCCACGACTTCGGCTT |
| | CCCCCAGGAGGAGTTCGACGGCAACCAGTTCCAGAAG |
| | GCCCAGGCCATCAGCG (SEQ ID NO:1340) |
| No | [Phosp] CCTGGGCCTTCTGGAACTGGTTGCCGTCGAACTCC |
| | TCCTGGGGGAAGCCGAAGTCGTGGCGGTCCTTCAGGC |
| | AGCTGAAGGGGCTGAT (SEQ ID NO:1341) |
| Yes | [Phosp] TGCTGCACGAGATGATCCAGCAGACCTTCAACCTGT |
| | TCAGCACCAAGGACAGCAGCGCCGCCTGGGACGAGA |
| | GCCTGCTGGAGAAG (SEQ ID NO:1342) |
| No | [Phosp] AGGCTCTCGTCCCAGGCGGCGCTGCTGTCCTTGGTGC |
| | TGAACAGGTTGAAGGTCTGCTGGATCATCTCGTGC |
| | AGCACGCTGATGG (SEQ ID NO:1343) |
| Yes | [Phosp] TTCTACACCGAGCTGTACCAGCAGCTGAACGACCTG |
| | GAGGCCTGCGTGATCCAGGAGGTGGGCGTGGAGGAG |
| | ACCCCCCTGATGAACGTGG (SEQ ID NO:1344) |
| No | [Phosp] TCAGGGGGGTCTCCTCCACGCCCACCTCCTGGATCAC |
| | GCAGGCCTCCAGGTCGTTCAGCTGCTGGTACAGCT |
| | CGGTGTAGAACTTCTCCAGC (SEQ ID NO:1345) |
| Yes | [Phosp] ACAGCATCCTGGCCGTGAAGAAGTACTTCCAGCGCAT |
| | CACCCTGTACCTGACCGAGAAGAAGTACAGCCCCT |
| | GCGCCTGGGAGGTGG (SEQ ID NO:1346) |
| No | [Phosp] AGGCGCAGGGGCTGTACTTCTTCTCGGTCAGGTACAGG |
| | GTGATGCGCTGGAAGTACTTCTTCACGGCCAGGA |
| | TGCTGTCCACGTTCA (SEQ ID NO:1347) |
| Yes | [Phosp] TGCGCGCCGAGATCATGCGCAGCTTCAGCCTGAGCAC |
| | CAACCTGCAGGAGCGCCTGCGCCGCAAGGAGTAAT |
| | GAG (SEQ ID NO:1348) |
| No | [Phosp] AATTCTCATTACTCCTTGCGGCGCAGGCGCTCCTGCA |
| | GGTTGGTGCTCAGGCTGAAGCTGCGCATGATCTCG |
| | GCGCGCACCACCTCCC (SEQ ID NO:1349) |

[1162] Strategies for generating Mammalian Infergen glycosylation mutants. The sequence changes needed to produce mammalian, glycosylation competent Infergen are minor and can be introduced into the synthetic gene by standard site directed mutagenesis techniques (FIG. 27). FIG. 27 depicts a comparison of the nucleic acid sequences of Mammalian Infergen (SEQ ID NO:1375) and glycosylated mutants thereof (SEQ ID NOs:1376-1386); with the majority sequence shown above (SEQ ID NO:1374). The nucleotides that differ are shown in boxes. Codons used based on the preferred codon usage in mammals (Table 8). The nucleotides that differ from the majority sequence are shown in boxes.

[1163] FIG. 28 depicts an amino acid sequence comparison of human Interferon beta 1 (SEQ ID NO:1391) and exemplary IFN-β1 glycosylated mutants (SEQ ID NOs:1392-1396); with the majority sequence (SEQ ID NO:1390) shown above. Sites 1 and 2 are the positions where glycosylation mutants are generated. In general, only N-linked glycosylation sites are created at Site 1. Both N-linked and O-linked glycosylation sites are generated at Site 2. The naturally occurring N-linked glycosylation sites in human IFN-β1 and mutants are shown in boxes.

[1164] FIG. 29 depicts an amino acid sequence comparison of human Interferon omega-1 (SEQ ID NO:1398) and exemplary glycosylation mutants (SEQ ID NOs:1399-1403); with the majority sequence (SEQ ID NO:1397) shown above. Sites 1 and 2 are the positions where glycosylation mutants are generated. In general, only N-linked glycosylation sites are created at Site 1. Both N-linked and O-linked glycosylation sites are generated at Site 2. The naturally occurring N-linked glycosylation sites in human IFN-ω1 and mutants are shown in boxes.

### Example 2

### Design, Construction, Expression and Glycosylation Sites Generation of Mammalian Infergen Fusion constructs with Other Type I Interferon Signal Peptides

Materials and Methods

[1165] Construction of Fusion Genes

[1166] The amino acid alignments of Infergen, and exemplary Infergen fusion proteins, human Interferon Alpha 14 and Beta are shown in FIG. 30. A two-step polymerase chain reaction strategy was designed to synthesize the fusion genes for the proposed fusion proteins. The primers used in the PCR reactions are listed in Table 12, below.

TABLE 12

| | |
|---|---|
| Primer Name | Sequence (5′ to 3′) |

| | |
|---|---|
| IFNa14_Inner | GCCCTGGTGGTGCTGAGCTGCAAGAGCAGC- |
| | TGCAGCCTGGGCTGCGACCTGCCCCAGACCCACAGC |
| | (SEQ ID NO:1350) |
| IFNa14_Outer | TATAAAGCTTGCCACCATGGCCCTGCCCTTC- |
| | GCCCTGATGATGGCCCTGGTGGTGCTGAGCTGCAAG |
| | (SEQ ID NO:1351) |
| IFNb_Inner | GCCCTGCTGCTGTGCTTCAGCACCACCGCCC- |
| | TGAGCATGAGCTGCGACCTGCCCCAGACCCACAGC |
| | (SEQ ID NO:1352) |
| IFNb_Outer | TATAAAGCTTGCCACCATGACCAACAAGTGC- |
| | CTGCTGCAGATCGCCCTGCTGCTGTGCTTCAGCACC |
| | (SEQ ID NO: 1353) |
| INFERGEN_End | TATAGAATTCTCATTACTCCTTGCGGCGCAGGCG |
| | (SEQ ID NO: 1354) |

[1167] The mammalian Infergen gene was synthesized and cloned into pcDNA3.1 (Invitrogen, Carlsbad, Calif.) plasmid and was used as template. For the first round PCR to generate fusion Infergen gene with human Interferon Alpha 14 signal peptide, IFNa14_Inner primer was combined with INFERGEN_End primer to generate PCR templates for second round PCR that was carried out using IFNa14_Outer primer in combination with INFERGEN_END primer. The final PCR product was digested with both Hind III and EcoRI and cloned into predigested pcDNA3.1 vector. The same procedure was applied to generate Infergen gene with human Interferon Beta signal peptide except that IFNb_Inner and Outer primers were used to replace IFNa14_Inner and Outer primers, respectively.

[1168] Transient Transfection and Western Analysis

[1169] The Cos-7 cell line was selected to transiently over-express Infergen. Fugene-6 (Roche Applied Science, Indianapolis, Ind.) was used as the transfection reagent and the manufacturer's protocol was followed. Three days after the transfection, conditioned media was collected, then filtered through 0.22 μM Tissue Culture Filter Unit and concentrated with Centriplus YM-10 Centrifugal Filter Unit (Millipore, Billerica, Mass.). Protein concentrations were measured. The attached cells were collected and cell lysate made using conventional methods. Rabbit polyclonal antibodies made against E. coli over-expressed Infergen were used as primary antibodies in Western analysis.

[1170] Site-Directed Mutagenesis

[1171] The locations of exemplary glycosylation sites in the two fusion Infergen proteins are shown in FIG. 25. The QuikChange site-directed mutagenesis kit (Stratagene, La Jolla, Calif.) was used to generate these mutations.

Results

[1172] The fusion constructs were generated and the sequences confirmed. FIG. 30 depicts an amino acid sequence alignment of Infergen (SEQ ID NO: 1356), human IFN-α14 (SEQ ID NO:1358), human IFN-α1 (SEQ ID NO:1359), and exemplary fusion proteins with human IFN-α14 and human IFN-β signal peptides (SEQ ID NOs:1388 and 1389, respectively). The majority sequence is shown above (SEQ ID NO:1387).

[1173] The constructs were then transiently transfected into Cos-7 cells and the transfection results were analyzed with western blot using rabbit polyclonal antibodies against Infergen. The results are shown in FIG. 32.

[1174] FIG. 32 depicts Western blot analysis of the transient transfection results. Lanes 1-4 were loaded with conditioned media from Cos-7 cells transfected with a plasmid containing nucleotide sequences encoding: Infergen with IFN-α14 signal peptide (lane 1); Infergen with IFN-β signal peptide (lane 2); Infergen without signal peptide (lane 3); and β-galactosidase (lane 4). Lanes 5-8 were loaded with cell lysates of Cos-7 cells transfected with plasmids a plasmid containing nucleotide sequences encoding: Infergen with IFN-α14 signal peptide (lane 5); Infergen with IFN-β signal peptide (lane 6); Infergen without signal peptide (lane 7); and β-galactosidase (lane 8). Lane 9 was loaded with 30 ng of Infergen, produced by E. coli and obtained from a commercial source.

[1175] The results showed that both fusion proteins expressed well and were mostly secreted by the cells into the conditioned media, while the Infergen without signal peptide expressed poorly and existed intracellularly. The two fusion genes were selected as templates for generation of glycosylation sites.

[1176] While the present invention has been described with reference to the specific embodiments thereof, it should be understood by those skilled in the art that various changes may be made and equivalents may be substituted without departing from the true spirit and scope of the invention. In addition, many modifications may be made to adapt a particular situation, material, composition of matter, process, process step or steps, to the objective, spirit and scope of the present invention. All such modifications are intended to be within the scope of the claims appended hereto.

What is claimed is:

1. A variant of a parent Type 1 interferon, wherein the variant comprises at least one amino acid substitution compared to the parent Type 1 interferon, wherein the at least one amino acid substitution is selected from the group consisting of D31N, L31S, D31N, K31N, D102N, S102N, T102N, R102N, I102N, D108N, E108N, K108N, E138T, G138T, I138T, L138T, and P138T wherein the at least one amino acid substitution generates a glycosylation site.

2. The variant of claim 1, wherein the parent Type 1 interferon is an interferon α (IFN α).

3. The variant of claim 1, wherein the parent Type 1 interferon is an interferon β (IFN β).

4. The variant of claim 1, wherein the parent Type 1 interferon is an interferon κ (IFN-κ).

5. The variant of claim 1, wherein the parent Type 1 interferon is an interferon ω (IFN ω).

6. The variant of claim 1, wherein the parent Type 1 interferon is interferon τ (IFN τ).

7. The variant of claim 1, wherein the parent Type 1 interferon is a hybrid Type 1 interferon.

8. The variant of claim 2, wherein the at least one amino acid substitution is selected from the group consisting of D31N, D102N, D108N, E108N, E138T, G138T and I138T.

9. The variant of claim 2, wherein the interferon α is interferon alfacon-1.

10. The variant of claim 9, wherein the variant is selected from the group consisting of [D102N]interferon alfacon-1, [D108N]interferon alfacon-1, [E 138N] interferon alfacon-1, [D102N, D108N] interferon alfacon-1, [D102N, E138N]interferon alfacon-1, [D108N, E138N]interferon alfacon-1, and [D102N, D108N, E138N] interferon alfacon-1.

11. The variant of claim 9, wherein the variant is selected from the group consisting of [D102N]interferon alfacon-1, [D102N, D108N]interferon alfacon-1, [D102N, D108N, E138N] interferon alfacon-1, [D108N, E138N] interferon alfacon-1, [E138N] interferon alfacon-1, and [D102N, E138N]interferon alfacon-1.

12. The variant of claim 9, wherein the variant is [D102N]interferon alfacon-1.

13. The variant of claim 9, wherein the variant is [D108N]interferon alfacon-1.

14. The variant of claim 9, wherein the variant is [D138N]interferon alfacon-1.

15. The variant of claim 9, wherein the variant is [D102N, D138N] interferon alfacon-1.

16. The variant of claim 9, wherein the variant is [D102N, E138N]interferon alfacon-1.

17. The variant of claim 9, wherein the variant is [D108N, E138N]interferon alfacon-1.

18. The variant of claim 9, wherein the variant is [D102N, D108N, E138N] interferon alfacon-1.

19. The variant of claim 9, wherein the variant comprises a consensus amino acid sequence as set forth in SEQ ID Nos:2137-2151.

20. The variant of claim 8, wherein the parent interferon α is interferon α1.

21. The variant of claim 20, wherein the variant is selected from the group consisting of [D31N]interferon α1, [D102N]interferon α1, [D108N]interferon α1, [G138T]interferon α1, [D31N, D102N]interferon α1, [D31N, D108N]interferon α1, [D31N, G138T]interferon α1, [D102N, D108N]interferon α1, [D102N, G138T]interferon α1, [D108N, G138T]interferon α1, [D31N, D102N, D108N]interferon α1, [D31N, D102N, G138T]interferon α1, [D31N, D108N, G138T]interferon α1, [D102N, D108N, G138T]interferon α1, and [D31N, D102N, D108N, G138T]interferon α1.

22. The variant of claim 21, wherein the variant is [D31N]interferon α1.

23. The variant of claim 21, wherein the variant [D102N]interferon α 1.

24. The variant of claim 21, wherein the variant is [D108N]interferon α1.

25. The variant of claim 21, wherein the variant is [G138T]interferon α1.

26. The variant of claim 21, wherein the variant is [D31N, D102N]interferon α1.

27. The variant of claim 21, wherein the variant is [D31N, D108N]interferon α1.

28. The variant of claim 21, wherein the variant is [D31N, G138T]interferon α1.

29. The variant of claim 21, wherein the variant is [D102N, D108N]interferon α1.

30. The variant of claim 21, wherein the variant is [D102N, G138T]interferon α1.

31. The variant of claim 21, wherein the variant is [D108N, G138T]interferon α1.

32. The variant of claim 21, wherein the variant is [D31N, D102N, D108N]interferon α1.

33. The variant of claim 21, wherein the variant is [D31N, D102N, G138T] interferon α1.

34. The variant of claim 21, wherein the variant is [D31N, D108N, G138T]interferon α1.

35. The variant of claim 21, wherein the variant is [D102N, D108N, G138T]interferon α1.

36. The variant of claim 21, wherein the variant is [D31N, D102N, D108N, G138T] interferon α1.

37. The variant of claim 20 wherein the variant comprises an amino acid sequence as set forth in any one of SEQ ID Nos:1407-1421.

38. The variant of claim 8, wherein the parent interferon α is interferon α2a.

39. The variant of claim 38, wherein the variant is selected from the group consisting of [D31N]interferon α2a, [D102N]interferon α2a, [D108N]interferon α2a, [D31N, D102N]interferon α2a, [D31N, D108N]interferon α2a, [D102N, D108N]interferon α2a, [D31N, D102N, D108N]interferon α2a.

40. The variant of claim 39, wherein the variant is [D31N]interferon α2a.

41. The variant of claim 39, wherein the variant is [D102N]interferon α2a.

42. The variant of claim 39, wherein the variant is [D108N]interferon α2a.

43. The variant of claim 39, wherein the variant is [D31N, D102N]interferon α2a.

44. The variant of claim 39, wherein the variant is [D31N, D108N]interferon α2a.

45. The variant of claim 39, wherein the variant is [D102N, D108N]interferon α2a.

46. The variant of claim 39, wherein the variant is [D31N, D102N, D108N] interferon α2a.

47. The variant of claim 38, wherein the variant comprises an amino acid sequence as set forth in any one of SEQ ID Nos:1423-1433.

48. The variant of claim 8, wherein the parent interferon α is interferon α2b.

49. The variant of claim 48, wherein the variant is selected from the group consisting of [D31N] interferon α2b, [D102N]interferon α2b, [D108N]interferon α2b, [D31N, D102N]interferon α2b, [D31N, D108N]interferon α2b, [D102N, D108N]interferon α2b, [D31N, D102N, D108N]interferon α2b.

50. The variant of claim 49, wherein the variant is [D31N]interferon α2b.

51. The variant of claim 49, wherein the variant is [D102N]interferon α2b.

52. The variant of claim 49, wherein the variant is [D108N]interferon α2b.

53. The variant of claim 49, wherein the variant is [D31N, D102N]interferon α2b.

54. The variant of claim 49, wherein the variant is [D31N, D108N]interferon α2b.

55. The variant of claim 49, wherein the variant is [D102N, D108N] interferon α2b.

56. The variant of claim 49, wherein the variant is [D31N, D102N, D108N]interferon α2b.

57. The variant of claim 48, wherein the variant comprises an amino acid sequence as set forth in any one of SEQ ID Nos:1439-1449.

58. The variant of claim 8, wherein the parent interferon α is interferon α4a.

59. The variant of claim 58, wherein the variant is selected from the group consisting of [D31N]interferon α4a, [D102N]interferon α4a, [E108N]interferon α4a, [E138T]interferon α4a, [D31N, D102N]interferon α4a, [D31N, E108N]interferon α4a, [D31N, E138T]interferon α4a, [D102N, E108N]interferon α4a, [D102N, E138T]interferon α4a, [E108N, E138T]interferon α4a, [D31N, D102N, E108N]interferon α4a, [D31N, D102N, E138T]interferon α4a, [D31N, E108N, E138T]interferon α4a, [D102N, E108N, E138T]interferon α4a, and [D31N, D102N, E108N, E138T]interferon α4a.

60. The variant of claim 59, wherein the variant is [D31N]interferon α4a.

61. The variant of claim 59, wherein the variant is [D102N]interferon α4a]interferon α4a.

62. The variant of claim 59, wherein the variant is [E108N]interferon α4a.

63. The variant of claim 59, wherein the variant is [E138T]interferon α4a.

64. The variant of claim 59, wherein the variant is [D31N, D102N]interferon α4a.

65. The variant of claim 59, wherein the variant is [D31N, E108N]interferon α4a.

66. The variant of claim 59, wherein the variant is [D31N, E138T]interferon α4a.

67. The variant of claim 59, wherein the variant is [D102N, E108N]interferon α4a.

68. The variant of claim 59, wherein the variant is [D102N, E138T]interferon α4a.

69. The variant of claim 59, wherein the variant is [E108N, E138T] interferon α4a.

70. The variant of claim 59, wherein the variant is [D31N, D102N, E108N]interferon α4a.

71. The variant of claim 59, wherein the variant is [D31N, D102N, E138T]interferon α4a.

72. The variant of claim 59, wherein the variant is [D31N, E108N, E138T] interferon α4a.

73. The variant of claim 59, wherein the variant is [D102N, E108N, E138T]interferon α4a.

74. The variant of claim 59, wherein the variant is [D31N, D102N, E108N, E138T]interferon α4a.

75. The variant of claim 58, wherein the variant comprises an amino acid sequence as set forth in any one of SEQ ID Nos:1455-1469.

76. The variant of claim 8, wherein the parent interferon α is interferon α4b.

77. The variant of claim 76, wherein the variant is selected from the group consisting of [D31N]interferon α4b, [D102N]interferon α4b, [E108N]interferon α4b, [E138T]interferon α4b, [D31N, D102N]interferon α4b, [D31N, E108N]interferon α4b, [D31N, E138T]interferon α4b, [D102N, E108N]interferon α4b, [D102N, E138T]interferon α4b, [E108N, E138T]interferon α4b, [D31N, D102N, E108N]interferon α4b, [D31N, D102N, E138T]interferon α4b, [D31N, E108N, E138T]interferon α4b, [D102N, E108N, E138T]interferon α4b, and [D31N, D102N, E108N, E138T]interferon α4b.

78. The variant of claim 77, wherein the variant is [D31N]interferon α4b.

79. The variant of claim 77, wherein the variant is [D102N]interferon α4b.

80. The variant of claim 77, wherein the variant is [E108N]interferon α4b.

81. The variant of claim 77, wherein the variant is [E138T]interferon α4b.

82. The variant of claim 77, wherein the variant is [D31N, D102N]interferon α4b.

83. The variant of claim 77, wherein the variant is [D31N, E108N]interferon α4b.

84. The variant of claim 77, wherein the variant is [D31N, E138T]interferon α4b.

85. The variant of claim 77, wherein the variant is [D102N, E108N]interferon α4b.

86. The variant of claim 77, wherein the variant is [D102N, E138T]interferon α4b.

87. The variant of claim 77, wherein the variant is [E108N, E138T]interferon α4b.

88. The variant of claim 77, wherein the variant is [D31N, D102N, E 108N]interferon α4b.

89. The variant of claim 77, wherein the variant is [D31N, D102N, E138T]interferon α4b.

90. The variant of claim 77, wherein the variant is [D31N, E108N, E138T]interferon α4b.

91. The variant of claim 77, wherein the variant is [D102N, E108N, E138T]interferon α4b.

92. The variant of claim 77, wherein the variant is [D31N, D102N, E 108N, E138T]interferon α4b.

93. The variant of claim 76, wherein the variant comprises an amino acid sequence as set forth in any one of SEQ ID Nos:1471-1485.

94. The variant of claim 8, wherein the parent interferon α is interferon α5.

95. The variant of claim 94, wherein the variant is selected from the group consisting of [D31N]interferon α5, [D102N]interferon α5, [D108N]interferon α5, [E138T]interferon α5, [D31N, D102N]interferon α5, [D31N, D108N]interferon α5, [D31N, E138T]interferon α5, [D102N, D108N]interferon α5, [D102N, E138T]interferon α5, [D108N, E138T]interferon α5, [D31N, D102N, D108N]interferon α5, [D31N, D102N, E138T]interferon α5, [D31N, D108N, E138T]interferon α5, [D102N, D108N, EI138T]interferon α5, and [D31N, D102N, D108N, E138T] interferon α5.

96. The variant of claim 95, wherein the variant is [D31N]interferon α5.

97. The variant of claim 95, wherein the variant is [D102N]interferon α5.

98. The variant of claim 95, wherein the variant is [D108N]interferon α5.

99. The variant of claim 95, wherein the variant is [E138T]interferon α5.

100. The variant of claim 95, wherein the variant is [D31N, D102N]interferon α5.

101. The variant of claim 95, wherein the variant is [D31N, D108N]interferon α5.

102. The variant of claim 95, wherein the variant is [D31N, E138T]interferon α5.

103. The variant of claim 95, wherein the variant is [D102N, D108N]interferon α5.

104. The variant of claim 95, wherein the variant is [D102N, E138T]interferon α5.

105. The variant of claim 95, wherein the variant is [D108N, E138T]interferon α5.

106. The variant of claim 95, wherein the variant is [D31N, D102N, D108N]interferon α5.

107. The variant of claim 95, wherein the variant is [D31N, D102N, E138T]interferon α5.

108. The variant of claim 95, wherein the variant is [D31N, D108N, E138T]interferon α5.

109. The variant of claim 95, wherein the variant is [D102N, D108N, E138T] interferon α5.

110. The variant of claim 95, wherein the variant is [D31N, D102N, D108N, E138T] interferon α5.

111. The variant of claim 94, wherein the variant comprises an amino acid sequence as set forth in any one of SEQ ID Nos:1487-1501.

112. The variant of claim 8, wherein the parent interferon α is interferon α6.

113. The variant of claim 112, wherein the variant is selected from the group consisting of [D31N]interferon α6, [D102N]interferon α6, [D108N]interferon α6, [G138T]interferon α6, [D31N, D102N]interferon α6, [D31N, D108N]interferon α6, [D31N, G138T]interferon α6, [D102N, D108N]interferon α6, [D102N, G138T]interferon α6, [D108N, E138T]interferon α6, [D31N, D102N, D108N]interferon α6, [D31N, D102N, G138T]interferon α6, [D31N, D108N, G138T]interferon α6, [D102N, D108N, G138T]interferon α6, and [D31N, D102N, D108N, G138T] interferon α6.

114. The variant of claim 113, wherein the variant is [D31N]interferon α6.

115. The variant of claim 113, wherein the variant is [D102N]interferon α6.

116. The variant of claim 113, wherein the variant is [D108N]interferon α6.

117. The variant of claim 113, wherein the variant is [G138T]interferon α6.

118. The variant of claim 113, wherein the variant is [D31N, D102N] interferon α6.

119. The variant of claim 113, wherein the variant is [D31N, D108N]interferon α6.

120. The variant of claim 113, wherein the variant is [D31N, G138T]interferon α6.

121. The variant of claim 113, wherein the variant is [D102N, D108N] interferon α6.

122. The variant of claim 113, wherein the variant is [D102N, G138T]interferon α6.

123. The variant of claim 113, wherein the variant is [D108N, E138T]interferon α6.

124. The variant of claim 113, wherein the variant is [D31N, D102N, D108N] interferon α6.

125. The variant of claim 113, wherein the variant is [D31N, D102N, G138T] interferon α6.

126. The variant of claim 113, wherein the variant is [D31N, D108N, G138T] interferon α6.

127. The variant of claim 113, wherein the variant is [D102N, D108N, G138T]interferon α6.

128. The variant of claim 113, wherein the variant is [D31N, D102N, D108N, G138T]interferon α6.

129. The variant of claim 112, wherein the variant comprises an amino acid sequence as set forth in any one of SEQ ID Nos:1503-1517.

130. The variant of claim 8, wherein the parent interferon α is interferon α7.

131. The variant of claim 130, wherein the variant is selected from the group consisting of [D31N] interferon α7, [D102N] interferon α7, [E108N]interferon α7, [E138T]interferon α7, [D31N, D102N]interferon α7, [D31N, E108N]interferon α7, [D31N, E138T]interferon α7, [D102N, E108N]interferon α7, [D102N, E138T]interferon α7, [D108N, E138T]interferon α7, [D31N, D102N, E108N]interferon α7, [D31N, D102N, E138T]interferon α7, [D31N, E108N, E138T]interferon α7, [D102N, E108N, E138T]interferon α7, and [D31N, D102N, E108N, E138T] interferon α7.

132. The variant of claim 131, wherein the variant is [D31N]interferon α7.

133. The variant of claim 131, wherein the variant is [D102N] interferon α7.

134. The variant of claim 131, wherein the variant is [E108N] interferon α7.

135. The variant of claim 131, wherein the variant is [E138T]interferon α7.

136. The variant of claim 131, wherein the variant is [D31N, D102N] interferon α7.

137. The variant of claim 131, wherein the variant is [D31N, E108N]interferon α7.

138. The variant of claim 131, wherein the variant is [D31N, E138T]interferon α7.

139. The variant of claim 131, wherein the variant is [D102N, E108N] interferon α7.

140. The variant of claim 131, wherein the variant is [D102N, E138T]interferon α7.

141. The variant of claim 131, wherein the variant is [D108N, E138T] interferon α7.

142. The variant of claim 131, wherein the variant is [D31N, D102N, E108N] interferon α7.

143. The variant of claim 131, wherein the variant is [D31N, D102N, E138T]interferon α7.

144. The variant of claim 131, wherein the variant is [D31N, E108N, E138T]interferon α7.

145. The variant of claim 131, wherein the variant [D102N, E108N, E138T]interferon α7.

146. The variant of claim 131, wherein the variant is [D31N, D102N, E108N, E138T]interferon α7.

147. The variant of claim 130, wherein the variant comprises an amino acid sequence as set forth in any one of SEQ ID Nos:1519-1533.

148. The variant of claim 8, wherein the parent interferon α is interferon α8.

149. The variant of claim 148, wherein the variant is selected from the group consisting of [D31N]interferon α8, [D102N]interferon α8, [D108N]interferon α8, [I138T]interferon α8, [D31N, D102N]interferon α8, [D31N, D108N]interferon α8, [D31N, I138T]interferon α8, [D102N, D108N]interferon α8, [D102N, I138T]interferon α8, [D108N, I138T]interferon α8, [D31N, D102N, D108N]interferon α8, [D31N, D102N, I138T]interferon α8, [D31N, D108N, I138T]interferon α8, [D102N, D108N, I138T]interferon α8, and [D31N, D102N, D108N, I138T]interferon α8.

150. The variant of claim 149, wherein the variant is [D31N]interferon α8.

151. The variant of claim 149, wherein the variant is [D102N]interferon α8.

152. The variant of claim 149, wherein the variant is [D108N]interferon α8.

153. The variant of claim 149, wherein the variant is [I138T]interferon α8.

154. The variant of claim 149, wherein the variant is [D31N, D102N]interferon α8.

155. The variant of claim 149, wherein the variant is [D31N, D108N]interferon α8.

156. The variant of claim 149, wherein the variant is [D31N, I138T]interferon α8.

157. The variant of claim 149, wherein the variant is [D102N, D108N] interferon α8.

158. The variant of claim 149, wherein the variant is [D102N, I138T]interferon α8.

159. The variant of claim 149, wherein the variant is [D108N, I138T]interferon α8.

160. The variant of claim 149, wherein the variant is [D31N, D102N, D108N] interferon α8.

161. The variant of claim 149, wherein the variant is [D31N, D102N, I138T]interferon α8.

162. The variant of claim 149, wherein the variant is [D31N, D108N, I138T] interferon α8.

163. The variant of claim 149, wherein the variant is [D102N, D108N, I138T] interferon α8.

164. The variant of claim 149, wherein the variant is [D31N, D102N, D108N, I138T] interferon α8.

165. The variant of claim 148, wherein the variant comprises an amino acid sequence as set forth in any one of SEQ ID Nos:1535-1549.

166. The variant of claim 8, wherein the parent interferon α is interferon α10.

167. The variant of claim 166, wherein the variant is selected from the group consisting of [D31N]interferon α10, [D102N]interferon 10, [E108N]interferon α10, [E138T]interferon α10, [D31N, D102N]interferon α10, [D31N, E108N]interferon α 10, [D31N, E138T]interferon α10, [D102N, E108N]interferon α10, [D102N, E138T]interferon α10, [D108N, E138T]interferon α 10, [D31N, D102N, E108N]interferon α10, [D31N, D102N, E138T]interferon α10, [D31N, E108N, E138T]interferon α10, [D102N, E108N, E138T]interferon α10, and [D31N, D102N, E108N, E138T]interferon α10.

168. The variant of claim 167, wherein the variant is [D31N]interferon α10.

169. The variant of claim 167, wherein the variant is [D102N]interferon α 10.

170. The variant of claim 167, wherein the variant is [E108N]interferon α10.

171. The variant of claim 167, wherein the variant [E138T]interferon α 10.

172. The variant of claim 167, wherein the variant is [D31N, D102N] interferon α 10.

173. The variant of claim 167, wherein the variant is [D31N, E108N]interferon α10.

174. The variant of claim 167, wherein the variant is [D31N, E138T]interferon α10.

175. The variant of claim 167, wherein the variant is [D102N, E108N]interferon α 10.

176. The variant of claim 167, wherein the variant is [D102N, E138T]interferon α 10.

177. The variant of claim 167, wherein the variant is [E108N, E138T]interferon α10.

178. The variant of claim 167, wherein the variant is [D31N, D102N, E108N]interferon α10.

179. The variant of claim 167, wherein the variant is [D31N, D102N, E138T]interferon α10.

180. The variant of claim 167, wherein the variant is [D31N, E108N, E138T]interferon α10.

181. The variant of claim 167, wherein the variant is [D102N, E108N, E138T]interferon α10.

182. The variant of claim 167, wherein the variant is [D31N, D102N, E108N, E138T]interferon α10.

183. The variant of claim 166, wherein the variant comprises an amino acid sequence as set forth in any one of SEQ ID Nos:1551-1565.

184. The variant of claim 8, wherein the parent interferon α is interferon α 13.

185. The variant of claim 184, wherein the variant is selected from the group consisting of [D31N]interferon α13, [D102N]interferon α13, [D108N]interferon α13, [G138T]interferon α13, [D31N, D102N]interferon α13, [D31N, D108N]interferon α13, [D31N, G138T]interferon α13, [D102N, D108N]interferon α13, [D102N, G138T]interferon α13, [D108N, E138T]interferon α13, [D31N, D102N, D108N]interferon α13, [D31N, D102N, G138T]interferon α13, [D31N, D108N, G138T]interferon α13, [D102N, D108N, G138T]interferon α13, and [D31N, D102N, D108N, G138T]interferon α13.

186. The variant of claim 185, wherein the variant is [D31N]interferon α13.

187. The variant of claim 185, wherein the variant is [D102N]interferon α13,

188. The variant of claim 185, wherein the variant is [D108N]interferon α13.

189. The variant of claim 185, wherein the variant is [G138T]interferon α13.

190. The variant of claim 185, wherein the variant is [D31N, D102N]interferon α13.

191. The variant of claim 185, wherein the variant is [D31N, D108N]interferon α13.

192. The variant of claim 185, wherein the variant is [D31N, G138T]interferon α13.

193. The variant of claim 185, wherein the variant is [D102N, D108N]interferon α113.

194. The variant of claim 185, wherein the variant is [D102N, G138T]interferon α13.

195. The variant of claim 185, wherein the variant is [D108N, E138T]interferon α13.

196. The variant of claim 185, wherein the variant is [D31N, D102N, D108N]interferon α 13.

197. The variant of claim 185, wherein the variant is [D31N, D102N, G138T]interferon α13.

198. The variant of claim 185, wherein the variant is [D31N, D108N, G138T]interferon α113.

199. The variant of claim 185, wherein the variant is [D102N, D108N, G138T]interferon α13.

200. The variant of claim 185, wherein the variant is [D31N, D102N, D108N, G138T]interferon α 13.

201. The variant of claim 184, wherein the variant comprises an amino acid sequence as set forth in any one of SEQ ID Nos:1567-1581.

202. The variant of claim 8, wherein the parent interferon α is interferon α14.

203. The variant of claim 202, wherein the variant is selected from the group consisting of [D108N]interferon α14, [E138T]interferon α14, and [D108N, E138T]interferon α14.

204. The variant of claim 203, wherein the variant is [D108N]interferon α14.

205. The variant of claim 203, wherein the variant is [E138T]interferon α14.

206. The variant of claim 203, wherein the variant is [D108N, E138T]interferon α14.

207. The variant of claim 202, wherein the variant comprises an amino acid sequence as set forth in any one of SEQ ID Nos:1585-1592.

208. The variant of claim 8, wherein the parent interferon α is interferon α 16.

209. The variant of claim 208, wherein the variant is selected from the group consisting of [D31N]interferon α16, [D102N]interferon α16, [D108N]interferon α16, [E138T]interferon α16, [D31N, D102N] interferon α 16, [D31N, D108N]interferon α 16, [D31N, E 138T] interferon α 16, [D102N, D108N] interferon α 16, [D102N, E138T]interferon α16, [D108N, E138T]interferon α16, [D31N, D102N, D108N]interferon α16, [D31N, D102N, E138T]interferon α16, [D31N, D108N, E138T]interferon α16, [D102N, D108N, E138T]interferon α16, and [D31N, D102N, D108N, E138T]interferon α16.

210. The variant of claim 209, wherein the variant is [D31N]interferon α16.

211. The variant of claim 209, wherein the variant is [D102N]interferon α16.

212. The variant of claim 209, wherein the variant is [D108N]interferon α16.

213. The variant of claim 209, wherein the variant is [E138T]interferon α16.

214. The variant of claim 209, wherein the variant is [D31N, D102N]interferon α 16.

215. The variant of claim 209, wherein the variant is [D31N, D108N] interferon α16.

216. The variant of claim 209, wherein the variant is [D31N, E138T]interferon α16.

217. The variant of claim 209, wherein the variant is [D102N, D108N]interferon α16.

218. The variant of claim 209, wherein the variant is [D102N, E138T]interferon α16.

219. The variant of claim 209, wherein the variant is [D108N, E138T]interferon α16.

220. The variant of claim 209, wherein the variant is [D31N, D102N, D108N]interferon α16.

221. The variant of claim 209, wherein the variant is [D31N, D102N, E138T]interferon α16.

222. The variant of claim 209, [D31N, D108N, E138T]interferon α16.

223. The variant of claim 209, wherein the variant is [D31N, D102N, D108N, E138T]interferon α16.

224. The variant of claim 208, wherein the variant comprises an amino acid sequence as set forth in any one of SEQ ID Nos:1599-1613.

225. The variant of claim 8, wherein the parent interferon α is interferon α17.

226. The variant of claim 225, wherein the variant is selected from the group consisting of [D31N]interferon α17, [D102N]interferon α17, [E108N]interferon α17, [E138T]interferon α17, [D31N, D102N]interferon α17, [D31N, E108N]interferon α17, [D31N, E138T]interferon α17, [D102N, E108N]interferon α17, [D102N, E138T]interferon α17, [D108N, E138T]interferon α17, [D31N, D102N, E108N]interferon α17, [D31N, D102N, E138T]interferon α17, [D31N, E108N, E138T]interferon α17, [D102N, E108N, E138T]interferon α17, and [D31N, D102N, E108N, E138T]interferon α17.

227. The variant of claim 226, wherein the variant is [D31N]interferon α17.

228. The variant of claim 226, wherein the variant is [D102N]interferon α17.

229. The variant of claim 226, wherein the variant is [E108N]interferon α17.

230. The variant of claim 226, wherein the variant is [E138T]interferon α17.

231. The variant of claim 226, wherein the variant is [D31N, D102N] interferon α17.

232. The variant of claim 226, wherein the variant is [D31N, E 108N]interferon α17.

233. The variant of claim 226, wherein the variant is [D31N, E138T]interferon α17.

234. The variant of claim 226, wherein the variant is [D102N, E108N]interferon α 17.

235. The variant of claim 226, wherein the variant is [D102N, E138T]interferon α17.

236. The variant of claim 226, wherein the variant is [D108N, E138T]interferon α17.

237. The variant of claim 226, wherein the variant is [D31N, D102N, E108N]interferon α17.

238. The variant of claim 226, wherein the variant is [D31N, D102N, E138T]interferon α 17.

239. The variant of claim 226, wherein the variant is [D31N, E108N, E138T]interferon α17.

240. The variant of claim 226, wherein the variant is [D102N, E108N, E138T]interferon α17.

241. The variant of claim 226, wherein the variant is [D31N, D102N, E108N, E138T]interferon α 17.

242. The variant of claim 225, wherein the variant comprises an amino acid sequence as set forth in any one of SEQ ID Nos:1615-1629.

243. The variant of claim 8, wherein the parent interferon α is interferon α21.

244. The variant of claim 243, wherein the variant is selected from the group consisting of [D31N] interferon α21, [D102N]interferon α21, [E108N]interferon α21, [E138T]interferon α21, [D31N, D102N]interferon α21, [D31N, E108N]interferon α21, [D31N, E138T]interferon α21, [D102N, E108N]interferon α21, [D102N, E138T]interferon α21, [D108N, E138T]interferon α21, [D31N, D102N, E108N]interferon α21, [D31N, D102N, E138T]interferon α21, [D31N, E108N, E138T] interferon α21, [D102N, E108N, E138T] interferon α21, and [D31N, D102N, E108N, E138T]interferon α21.

245. The variant of claim 244, wherein the variant is [D31N]interferon α21.

246. The variant of claim 244, wherein the variant is [D102N]interferon α21.

247. The variant of claim 244, wherein the variant is [E108N]interferon α21.

248. The variant of claim 244, wherein the variant is [E138T]interferon α21.

249. The variant of claim 244, wherein the variant is [D31N, D102N] interferon α21.

250. The variant of claim 244, wherein the variant is [D31N, E108N]interferon α21.

251. The variant of claim 244, wherein the variant is [D31N, E138T]interferon α21.

252. The variant of claim 244, wherein the variant [D102N, E108N]interferon α21.

253. The variant of claim 244, wherein the variant is [D102N, E138T]interferon α21.

254. The variant of claim 244, wherein the variant is [D108N, E138T]interferon α21.

255. The variant of claim 244, wherein the variant is [D31N, D102N, E108N] interferon α21.

256. The variant of claim 244, wherein the variant is selected from the group consisting of [D31N, D102N, E138T] interferon α21.

257. The variant of claim 244, wherein the variant is [D31N, E108N, E138T]interferon α21.

258. The variant of claim 244, wherein the variant is [D102N, E108N, E138T]interferon α21.

259. The variant of claim 244, wherein the variant is [D31N, D102N, E108N, E138T]interferon α21.

260. The variant of claim 243, wherein the variant comprises an amino acid sequence as set forth in any one of SEQ ID Nos:1631-1645.

261. The variant of claim 8, wherein the parent interferon α is interferon αH.

262. The variant of claim 261, wherein the variant is selected from the group consisting of [D108N]interferon αH, [E138T]interferon αH, and [D108N, E138T] interferon αH.

263. The variant of claim 262, wherein the variant is [D108N]interferon αH.

264. The variant of claim 262, wherein the variant is [E138T]interferon αH.

265. The variant of claim 262, wherein the variant is [D108N, E138T] interferon αH.

266. The variant of claim 261, wherein the variant comprises an amino acid sequence as set forth in any one of SEQ ID Nos:1649-1656.

267. The variant of claim 8, wherein the parent interferon α is interferon αI.

268. The variant of claim 267, wherein the variant is selected from the group consisting of [D31N]interferon αI, [D102N] interferon α1, [E108N]interferon αI, [E138T]interferon αI, [D31N, D102N]interferon α1, [D31N, E108N]interferon α1, [D31N, E138T]interferon α1, [D102N, E108N]interferon αI, [D102N, E138T]interferon αI, [D108N, E138T]interferon α1, [D31N, D102N, E108N]interferon α1, [D31N, D102N, E138T]interferon α1, [D31N, E108N, E138T]interferon α1, [D102N, E108N, E138T]interferon αI, and [D31N, D102N, E108N, E138T] interferon α1.

269. The variant of claim 268, wherein the variant is [D31N] interferon αI.

270. The variant of claim 268, wherein the variant is [D102N]interferon αI.

271. The variant of claim 268, wherein the variant is [E108N]interferon α1.

272. The variant of claim 268, wherein the variant is [E138T]interferon α1.

273. The variant of claim 268, wherein the variant is [D31N, D102N] interferon αI.

274. The variant of claim 268, wherein the variant is [D31N, E108N]interferon αI.

275. The variant of claim 268, wherein the variant is [D31N, E138T]interferon αI.

276. The variant of claim 268, wherein the variant is [D102N, E108N]interferon αI.

277. The variant of claim 268, wherein the variant is [D102N, E138T]interferon αI.

278. The variant of claim 268, wherein the variant is [D108N, E138T] interferon αI.

279. The variant of claim 268, wherein the variant is [D31N, D102N, E108N] interferon αI.

280. The variant of claim 268, wherein the variant is [D31N, D102N, E138T]interferon αI.

281. The variant of claim 268, wherein the variant is [D31N, E108N, E138T] interferon αI.

282. The variant of claim 268, wherein the variant is [D102N, E108N, E138T] interferon αI.

283. The variant of claim 268, wherein the variant is [D31N, D102N, E108N, E138T] interferon αI.

284. The variant of claim 267, wherein the variant comprises an amino acid sequence as set forth in any one of SEQ ID Nos:1663-1677.

285. The variant of claim 8, wherein the parent interferon α is interferon αJ1.

286. The variant of claim 285, wherein the variant is selected from the group consisting of [D31N]interferon αJ1, [D102N]interferon αJ1, [E108N] interferon αJ1; [E138T]interferon αJ1, [D31N, D102N]interferon αJ1, [D31N, E108N]interferon αJ1, [D31N, E138T]interferon αJ1, [D102N, E108N]interferon αJ1, [D102N, E138T]interferon αJ1, [D108N, E138T]interferon αJ1, [D31N, D102N, E108N]interferon αJ1, [D31N, D102N, E138T]interferon αJ1, [D31N, E108N, E138T]interferon αJ1, [D102N, E108N, E138T]interferon αJ1, and [D31N, D102N, E108N, E138T]interferon αJ1.

287. The variant of claim 286, wherein the variant is [D31N]interferon αJ1.

288. The variant of claim 286, wherein the variant is [D102N]interferon αJ1.

289. The variant of claim 286, wherein the variant is [E108N]interferon αJ1.

290. The variant of claim 286, wherein the variant is [E138T]interferon αJ1.

291. The variant of claim 286, wherein the variant is [D31N, D102N]interferon αJ1.

292. The variant of claim 286, wherein the variant is [D31N, E108N]interferon αJ1.

293. The variant of claim 286, wherein the variant is [D31N, E138T]interferon αJ1.

294. The variant of claim 286, wherein the variant is [D102N, E108N]interferon αJ1.

295. The variant of claim 286, wherein the variant is [D102N, E138T]interferon αJ1.

296. The variant of claim 286, wherein the variant is [D108N, E138T]interferon αJ1.

297. The variant of claim 286, wherein the variant is [D31N, D102N, E108N] interferon αJ1.

298. The variant of claim 286, wherein the variant is [D31N, D102N, E138T]interferon αJ1.

299. The variant of claim 286, wherein the variant is [D31N, E108N, E138T]interferon αJ1.

300. The variant of claim 286, wherein the variant is [D102N, E108N, E138T]interferon αJ1.

301. The variant of claim 286, wherein the variant is [D31N, D102N, E108N, E138T]interferon αJ1.

302. The variant of claim 285, wherein the variant comprises an amino acid sequence as set forth in any one of SEQ ID Nos:1678-1693.

303. The variant of claim 3, wherein the at least one amino acid substitution is selected from the group consisting of L31S, S102N, and E138T.

304. The variant of claim 303, wherein the variant is selected from the group consisting of [L31S]interferon-β, [S102N]interferon-β, [E138T]interferon-β, [L31S, S102N]interferon-β, [L31S, E138T]interferon-β, [S102N, E138T]interferon-β, and [L31S, S102N, E138T]interferon-β.

305. The variant of claim 304, wherein the variant is [L31S]interferon-β.

306. The variant of claim 304, wherein the variant is [S102N]interferon-β.

307. The variant of claim 304, wherein the variant is [E138T]interferon-β.

308. The variant of claim 304, wherein the variant is [L31S, S102N]interferon-β.

309. The variant of claim 304, wherein the variant is [L31S E138T]interferon-β.

310. The variant of claim 304, wherein the variant is [S102N, E138T]interferon-β.

311. The variant of claim 304, wherein the variant is [L31S, S102N, E138T]interferon-β.

312. The variant of claim 303, wherein the variant comprises an amino acid sequence as set forth in any one of SEQ ID Nos:1695-1706.

313. The variant of claim 4, wherein the at least one amino acid substitution is selected from the group consisting of L31S, T102N, K108N, and P138T.

314. The variant of claim 313, wherein the variant is selected from the group consisting of [L31S]interferon κ, [T102N]interferon κ, [K108N]interferon K, [P138T]interferon κ, [L31S, T102N]interferon κ, [L31S, K108N]interferon κ, [L31S, P138T]interferon κ, [T102N, K108N]interferon κ, [T102N, P138T]interferon κ, [K108N, P138T]interferon κ, [L31S, T102N, K108N]interferon κ, [L31S, T102N, P138T]interferon κ, [L31S, K108N, P138T]interferon κ, [T102N, K108N, P138T]interferon κ, and [L31S, T102N, K108N, P138T]interferon κ.

315. The variant of claim 314, wherein the variant is [L31S]interferon κ.

316. The variant of claim 314, wherein the variant is [T102N]interferon κ.

317. The variant of claim 314, wherein the variant is [K108N]interferon κ.

318. The variant of claim 314, wherein the variant is [P138T] interferon κ.

319. The variant of claim 314, wherein the variant is [L31S, T102N]interferon κ.

320. The variant of claim 314, wherein the variant is [L31S, K108N]interferon κ.

321. The variant of claim 314, wherein the variant is [L31S, P138T]interferon K.

322. The variant of claim 314, wherein the variant is [T102N, K108N]interferon κ.

323. The variant of claim 314, wherein the variant is [T102N, P138 T] interferon κ.

324. The variant of claim 314, wherein the variant is [K108N, P138T] interferon κ.

325. The variant of claim 314, wherein the variant is [L31S, T102N, K108N]interferon κ.

326. The variant of claim 314, wherein the variant is [L31S, T102N, P138T] interferon κ.

327. The variant of claim 314, wherein the variant is [L31S, K108N, P138T]interferon κ.

328. The variant of claim 314, wherein the variant is [T102N, K108N, P138T] interferon κ.

329. The variant of claim 314, wherein the variant is [L31S, T102N, K108N, P138T]interferon κ.

330. The variant of claim 313, wherein the variant comprises an amino acid sequence as set forth in any one of SEQ ID Nos:1711-1725.

331. The variant of claim 5, wherein the at least one amino acid substitution is selected from the group consisting of D31N, R102N, and G138T.

332. The variant of claim 331, wherein the variant is selected from the group consisting of [D31N]interferon ω, [R102N]interferon ω, [G138T]interferon ω, [D31N, R102N]interferon ω, [D31N, G138T]interferon ω, [R102N, G138T]interferon (o, [D31N, R102N, G138T]interferon ω.

333. The variant of claim 332, wherein the variant is [D31N] interferon ω.

334. The variant of claim 332, wherein the variant is [R102N]interferon ω.

335. The variant of claim 332, wherein the variant is [G138T]interferon ω.

336. The variant of claim 332, wherein the variant is [D31N, R102N] interferon co.

337. The variant of claim 332, wherein the variant is [D31N, G138T]interferon ω.

338. The variant of claim 332, wherein the variant is [R102N, G138T]interferon ω.

339. The variant of claim 332, wherein the variant is [D31N, R102N, G138T]interferon ω.

340. The variant of claim 331, wherein the variant comprises an amino acid sequence as set forth in any one of SEQ ID Nos:1727-1738.

341. The variant of claim 6, wherein the at least one amino acid substitution is selected from the group consisting of K31N, I102N, E108N, and L138T.

342. The variant of claim 341, wherein the variant is selected from the group consisting of [K31N]interferon τ, [1102N]interferon τ, [E108N]interferon T, [L138T] interferon τ, [K31N, I102N] interferon τ, [K31N, E108N]interferon τ, [K31N, L138T]interferon τ, [I102N, E108N]interferon τ, [I102N, L138T]interferon τ, [E108N, L138T]interferon r, [K31N, I102N, E108N]interferon τ, [K31N, I102N, L138T]interferon τ, [K31N, E108N, L138T]interferon τ, [I102N, E108N, L138T]interferon τ, and [K31N, I102N, E108N, L138T]interferon τ.

343. The variant of claim 342, wherein the variant is [K31N]interferon τ.

344. The variant of claim 342, wherein the variant is [I102N]interferon τ.

345. The variant of claim 342, wherein the variant is [E108N]interferon τ.

346. The variant of claim 342, wherein the variant is [L138T]interferon τ.

347. The variant of claim 342, wherein the variant is [K31N, I102N]interferon τ.

348. The variant of claim 342, wherein the variant is [K31N, E108N]interferon τ.

349. The variant of claim 342, wherein the variant is [K31N, L138T]interferon τ.

350. The variant of claim 342, wherein the variant is [I102N, E108N]interferon τ.

351. The variant of claim 342, wherein the variant is [I102N, L138T]interferon T.

352. The variant of claim 342, wherein the variant is [E108N, L138T]interferon τ.

353. The variant of claim 342, wherein the variant is [K31N, I102N, E108N] interferon τ.

354. The variant of claim 342, wherein the variant is [K31N, I102N, L138T] interferon τ.

355. The variant of claim 342, wherein the variant is [K31N, E108N, L138T]interferon τ.

356. The variant of claim 342, wherein the variant is [I102N, E108N, L138T]interferon r.

357. The variant of claim 342, wherein the variant is [K31N, I102N, E108N, L138T] interferon τ.

358. The variant of claim 341, wherein the variant comprises an amino acid sequence as set forth in any one of SEQ ID Nos:1743-1757.

359. The variant of claim 1, wherein the variant comprises a carbohydrate moiety covalently linked to a non-native glycosylation site.

360. A polypeptide, wherein the polypeptide comprises a carrier peptide set forth in Table 9.

361. The polypeptide of claim 360, wherein the polypeptide is a native Type 1 interferon comprising an amino acid sequence as set forth in any one of SEQ ID Nos:1406, 1422, 1438, 1454, 1470, 1486, 1502, 1518, 1534, 1550, 1566, 1582, 1598, 1614, 1630, 1646, 1662, 1678, 1694, 1710, 1726, 1742, and 1758.

362. The polypeptide of claim 360, wherein the polypeptide binds erythropoietin receptor.

363. The polypeptide of claim 362, wherein the polypeptide comprises an amino acid sequence as set forth in SEQ ID Nos: 1774-1775.

364. The variant of any of claims 1, 2, 10, 11, 21, 39, 49, 59, 77, 95, 113, 131, 149, 167, 185, 203, 209, 226, 244, 262, 268, 286, 304, 314, 332, and 342 wherein the variant comprises a carrier peptide set forth in Table 9.

365. A pharmaceutical composition comprising the variant of claim 1; and a pharmaceutically acceptable excipient.

366. A pharmaceutical composition comprising the variant of claims 360 or 363; and a pharmaceutically acceptable excipient.

367. The composition of claim 365, wherein the pharmaceutically-acceptable excipient is suitable for oral delivery.

368. The composition of claim 366, wherein the pharmaceutically-acceptable excipient is suitable for oral delivery.

369. The composition of claim 367 or 368, wherein the pharmaceutically-acceptable excipient is suitable for parenteral delivery.

370. A polynucleotide comprising a nucleotide sequence encoding a variant of any one of claims 1, 2, 10, 11, 21, 39, 49, 59, 77, 95, 113, 131, 149, 167, 185, 203, 209, 226, 244, 262, 268, 286, 304, 314, 332, and 342.

371. The polynucleotide of claim 370, wherein the polynucleotide comprises codons corresponding to mammalian codon usage bias.

372. A polynucleotide comprising a nucleotide sequence encoding a variant of either of claims 1 or 7, wherein the polynucleotide has been selected or screened from a population of shuffled polynucleotides encoding the amino acid substitutions D31N, L31S, D31N, K31N, D102N, S102N, T102N, R102N, I102N, D108N, E108N, K108N, E138T, G138T, I138T, L138T, and P138T.

373. A polynucleotide comprising a nucleic acid sequence as set forth in any one of SEQ ID Nos: 1784-1798, 1801-1815, 1817-1831, 1833-1847, 1849-1863, 1865-1879, 1881-1895, 1897-1911, 1913-1927, 1929-1943, 1945-1959, 1961-1975, 1977-1991, 1993-2007, 2009-2023, 2025-2039, 2041-2055, 2057-2071, 2073-2087, 2089-2103, 2105-2119, 2121-2135, and 2137-2153.

374. An expression vector comprising the polynucleotide of claims 370 or 373 operably linked to a promoter functional in a eukaryotic cell.

375. A host cell comprising the polynucleotide of claims 370 or 373.

376. A host cell comprising the expression vector of claim 374.

377. The host cell of claim 375, wherein the host cell is a eukaryotic cell.

378. The host cell of claim 376, wherein the host cell is a eukaryotic cell.

379. A method for producing a variant of claim 1, the method comprising: culturing the host cell of claim 377 or 378 under conditions that favor production of the variant; and isolating the synthetic Type I interferon receptor polypeptide agonist from the culture.

380. A method of treating a disorder amenable to treatment with a Type 1 interferon, the method comprising administering to an individual in need thereof a therapeutically effective amount of a variant according to claim 1.

381. A method of prophylactically treating a disorder amenable to treatment with a Type 1 interferon, the method comprising administering to an individual in need thereof a prophylactically effective amount of a variant according to claim 1.

382. The method of treating a disorder of claim 380, wherein the disorder is a fibrotic disorder.

383. The method of treating a disorder of claim 380, wherein the disorder is cancer.

384. The method of treating a disorder of claim 380, wherein the disorder is multiple sclerosis.

385. The method of treating a disorder of claim 380, wherein the variant is a variant of a parent interferon-β.

386. The method of treating a disorder of claim 383, wherein the cancer is selected from the group consisting of malignant melanoma, renal cell carcinoma, multiple myeloma and leukemia.

387. The method of treating a disorder of claim 380 or 381, wherein the disorder is a viral infection.

388. The method of treating a disorder of claim 387, wherein the viral infection is caused by a virus of family Flaviviridae.

389. The method of treating a disorder of claim 388, wherein the virus of family Flaviviridae is selected from the group consisting of yellow fever virus, West Nile virus, dengue fever virus, and hepatitis C virus.

390. The method of treating a disorder of claim 389, wherein the virus of family Flaviviridae is hepatitis C virus.

391. The method of claims 380 or 381, wherein the therapeutically effective amount of a variant according to claim 1 is administered to the individual at a dosing interval selected from the group consisting of once a week, twice a week, and three times a week.

392. The method of claim 391, wherein the therapeutically effective amount of a variant according to claim 1 is administered to the individual at a dosing interval of once a week.

393. The method of claim 387, wherein the therapeutically effective amount of a variant according to claim 1 is administered to the individual on one occasion.

394. The method of claim 380-385, wherein the therapeutically effective amount of a variant according to claim 1 is administered to the individual by subcutaneous injection.

395. The method of claims 380-385, wherein the therapeutically effective amount of a variant according to claim 1 is administered to the individual intravenously.

396. The method of claims 380-385, wherein the therapeutically effective amount of a variant according to claim 1 is administered to the individual orally.

397. The method of claim 385, wherein the therapeutically effective amount of a variant according to claim 1 is administered to the individual intramuscularly.

398. The method of any of claims 380-385, wherein the individual is a human.

The application's sequence listing, which the Patent Office published only in electronic form, follows.

SEQUENCE LISTING (1405 sequences)

SEQ ID NO: 1 - protein, 165 aa, Homo sapiens [sequence omitted]

SEQ ID NO: 2 - protein, 165 aa, Artificial Sequence
  D2A Mutant IFN-alpha 2b
CALPQTHSLGSRRTLMLLAQMRRISLFSCLKDRHDFGFPQEEFGNQFQKAETIPVLHEMIQQIFNLFSTKDSSAAWDETLLDKFYTELYQQLNDLEACVIQGVGVTETPLMKEDSILAVRKYFQRITLYLKEKKYSPCAWEVVRAEIMRSFSLSTNLQESLRSKE

SEQ ID NO: 3 - protein, 165 aa, Artificial Sequence
  P4A Mutant IFN-alpha 2b
CDLAQTHSLGSRRTLMLLAQMRRISLFSCLKDRHDFGFPQEEFGNQFQKAETIPVLHEMIQQIFNLFSTKDSSAAWDETLLDKFYTELYQQLNDLEACVIQGVGVTETPLMKEDSILAVRKYFQRITLYLKEKKYSPCAWEVVRAEIMRSFSLSTNLQESLRSKE

SEQ ID NO: 4 - protein, 165 aa, Artificial Sequence
  Q5A Mutant IFN-alpha 2b
CDLPATHSLGSRRTLMLLAQMRRISLFSCLKDRHDFGFPQEEFGNQFQKAETIPVLHEMIQQIFNLFSTKDSSAAWDETLLDKFYTELYQQLNDLEACVIQGVGVTETPLMKEDSILAVRKYFQRITLYLKEKKYSPCAWEVVRAEIMRSFSLSTNLQESLRSKE

SEQ ID NO: 5 - protein, 165 aa, Artificial Sequence
  T6A Mutant IFN-alpha 2b
CDLPQAHSLGSRRTLMLLAQMRRISLFSCLKDRHDFGFPQEEFGNQFQKAETIPVLHEMIQQIFNLFSTKDSSAAWDETLLDKFYTELYQQLNDLEACVIQGVGVTETPLMKEDSILAVRKYFQRITLYLKEKKYSPCAWEVVRAEIMRSFSLSTNLQESLRSKE

SEQ ID NO: 6 - protein, 165 aa, Artificial Sequence
  H7A Mutant IFN-alpha 2b
CDLPQTASLGSRRTLMLLAQMRRISLFSCLKDRHDFGFPQEEFGNQFQKAETIPVLHEMIQQIFNLFSTKDSSAAWDETLLDKFYTELYQQLNDLEACVIQGVGVTETPLMKEDSILAVRKYFQRITLYLKEKKYSPCAWEVVRAEIMRSFSLSTNLQESLRSKE

SEQ ID NO: 7 - protein, 165 aa, Artificial Sequence
  S8A Mutant IFN-alpha 2b
CDLPQTHALGSRRTLMLLAQMRRISLFSCLKDRHDFGFPQEEFGNQFQKAETIPVLHEMIQQIFNLFSTKDSSAAWDETLLDKFYTELYQQLNDLEACVIQGVGVTETPLMKEDSILAVRKYFQRITLYLKEKKYSPCAWEVVRAEIMRSFSLSTNLQESLRSKE

SEQ ID NO: 8 - protein, 165 aa, Artificial Sequence
  L9A Mutant IFN-alpha 2b
CDLPQTHSAGSRRTLMLLAQMRRISLFSCLKDRHDFGFPQEEFGNQFQKAETIPVLHEMIQQIFNLFSTKDSSAAWDETLLDKFYTELYQQLNDLEACVIQGVGVTETPLMKEDSILAVRKYFQRITLYLKEKKYSPCAWEVVRAEIMRSFSLSTNLQESLRSKE

SEQ ID NO: 9 - protein, 165 aa, Artificial Sequence
  G10A Mutant IFN-alpha 2b
CDLPQTHSLASRRTLMLLAQMRRISLFSCLKDRHDFGFPQEEFGNQFQKAETIPVLHEMIQQIFNLFSTKDSSAAWDETLLDKFYTELYQQLNDLEACVIQGVGVTETPLMKEDSILAVRKYFQRITLYLKEKKYSPCAWEVVRAEIMRSFSLSTNLQESLRSKE

SEQ ID NO: 10 - protein, 165 aa, Artificial Sequence
  S11A Mutant IFN-alpha 2b
CDLPQTHSLGARRTLMLLAQMRRISLFSCLKDRHDFGFPQEEFGNQFQKAETIPVLHEMIQQIFNLFSTKDSSAAWDETLLDKFYTELYQQLNDLEACVIQGVGVTETPLMKEDSILAVRKYFQRITLYLKEKKYSPCAWEVVRAEIMRSFSLSTNLQESLRSKE

SEQ ID NO: 11 - protein, 165 aa, Artificial Sequence
  R12A Mutant IFN-alpha 2b
CDLPQTHSLGSARTLMLLAQMRRISLFSCLKDRHDFGFPQEEFGNQFQKAETIPVLHEMIQQIFNLFSTKDSSAAWDETLLDKFYTELYQQLNDLEACVIQGVGVTETPLMKEDSILAVRKYFQRITLYLKEKKYSPCAWEVVRAEIMRSFSLSTNLQESLRSKE

SEQ ID NO: 12 - protein, 165 aa, Artificial Sequence
  R13A Mutant IFN-alpha 2b
CDLPQTHSLGSRATLMLLAQMRRISLFSCLKDRHDFGFPQEEFGNQFQKAETIPVLHEMIQQIFNLFSTKDSSAAWDETLLDKFYTELYQQLNDLEACVIQGVGVTETPLMKEDSILAVRKYFQRITLYLKEKKYSPCAWEVVRAEIMRSFSLSTNLQESLRSKE

SEQ ID NO: 13 - protein, 165 aa, Artificial Sequence
  T14A Mutant IFN-alpha 2b
CDLPQTHSLGSRRALMLLAQMRRISLFSCLKDRHDFGFPQEEFGNQFQKAETIPVLHEMIQQIFNLFSTKDSSAAWDETLLDKFYTELYQQLNDLEACVIQGVGVTETPLMKEDSILAVRKYFQRITLYLKEKKYSPCAWEVVRAEIMRSFSLSTNLQESLRSKE

SEQ ID NO: 14 - protein, 165 aa, Artificial Sequence
  L15A Mutant IFN-alpha 2b
CDLPQTHSLGSRRTAMLLAQMRRISLFSCLKDRHDFGFPQEEFGNQFQKAETIPVLHEMIQQIFNLFSTKDSSAAWDETLLDKFYTELYQQLNDLEACVIQGVGVTETPLMKEDSILAVRKYFQRITLYLKEKKYSPCAWEVVRAEIMRSFSLSTNLQESLRSKE

SEQ ID NO: 15 - protein, 165 aa, Artificial Sequence
  M16A Mutant IFN-alpha 2b
CDLPQTHSLGSRRTLALLAQMRRISLFSCLKDRHDFGFPQEEFGNQFQKAETIPVLHEMIQQIFNLFSTKDSSAAWDETLLDKFYTELYQQLNDLEACVIQGVGVTETPLMKEDSILAVRKYFQRITLYLKEKKYSPCAWEVVRAEIMRSFSLSTNLQESLRSKE

SEQ ID NO: 16 - protein, 165 aa, Artificial Sequence
  L17A Mutant IFN-alpha 2b
CDLPQTHSLGSRRTLMALAQMRRISLFSCLKDRHDFGFPQEEFGNQFQKAETIPVLHEMIQQIFNLFSTKDSSAAWDETLLDKFYTELYQQLNDLEACVIQGVGVTETPLMKEDSILAVRKYFQRITLYLKEKKYSPCAWEVVRAEIMRSFSLSTNLQESLRSKE

SEQ ID NO: 17 - protein, 165 aa, Artificial Sequence
  Q20A Mutant IFN-alpha 2b
CDLPQTHSLGSRRTLMLLAAMRRISLFSCLKDRHDFGFPQEEFGNQFQKAETIPVLHEMIQQIFNLFSTKDSSAAWDETLLDKFYTELYQQLNDLEACVIQGVGVTETPLMKEDSILAVRKYFQRITLYLKEKKYSPCAWEVVRAEIMRSFSLSTNLQESLRSKE

SEQ ID NO: 18 - protein, 165 aa, Artificial Sequence
  R23A Mutant IFN-alpha 2b
CDLPQTHSLGSRRTLMLLAQMRAISLFSCLKDRHDFGFPQEEFGNQFQKAETIPVLHEMIQQIFNLFSTKDSSAAWDETLLDKFYTELYQQLNDLEACVIQGVGVTETPLMKEDSILAVRKYFQRITLYLKEKKYSPCAWEVVRAEIMRSFSLSTNLQESLRSKE

SEQ ID NO: 19 - protein, 165 aa, Artificial Sequence
  I24A Mutant IFN-alpha 2b
CDLPQTHSLGSRRTLMLLAQMRRASLFSCLKDRHDFGFPQEEFGNQFQKAETIPVLHEMIQQIFNLFSTKDSSAAWDETLLDKFYTELYQQLNDLEACVIQGVGVTETPLMKEDSILAVRKYFQRITLYLKEKKYSPCAWEVVRAEIMRSFSLSTNLQESLRSKE

SEQ ID NO: 20 - protein, 165 aa, Artificial Sequence
  S25A Mutant IFN-alpha 2b
CDLPQTHSLGSRRTLMLLAQMRRIALFSCLKDRHDFGFPQEEFGNQFQKAETIPVLHEMIQQIFNLFSTKDSSAAWDETLLDKFYTELYQQLNDLEACVIQGVGVTETPLMKEDSILAVRKYFQRITLYLKEKKYSPCAWEVVRAEIMRSFSLSTNLQESLRSKE

SEQ ID NO: 21 - protein, 165 aa, Artificial Sequence
  L26A Mutant IFN-alpha 2b
CDLPQTHSLGSRRTLMLLAQMRRISAFSCLKDRHDFGFPQEEFGNQFQKAETIPVLHEMIQQIFNLFSTKDSSAAWDETLLDKFYTELYQQLNDLEACVIQGVGVTETPLMKEDSILAVRKYFQRITLYLKEKKYSPCAWEVVRAEIMRSFSLSTNLQESLRSKE

SEQ ID NO: 22 - protein, 165 aa, Artificial Sequence
  S28A Mutant IFN-alpha 2b
CDLPQTHSLGSRRTLMLLAQMRRISLFACLKDRHDFGFPQEEFGNQFQKAETIPVLHEMIQQIFNLFSTKDSSAAWDETLLDKFYTELYQQLNDLEACVIQGVGVTETPLMKEDSILAVRKYFQRITLYLKEKKYSPCAWEVVRAEIMRSFSLSTNLQESLRSKE

SEQ ID NO: 23 - protein, 165 aa, Artificial Sequence
  C29A Mutant IFN-alpha 2b
CDLPQTHSLGSRRTLMLLAQMRRISLFSALKDRHDFGFPQEEFGNQFQKAETIPVLHEMIQQIFNLFSTKDSSAAWDETLLDKFYTELYQQLNDLEACVIQGVGVTETPLMKEDSILAVRKYFQRITLYLKEKKYSPCAWEVVRAEIMRSFSLSTNLQESLRSKE

SEQ ID NO: 24 - protein, 165 aa, Artificial Sequence
  L30A Mutant IFN-alpha 2b
CDLPQTHSLGSRRTLMLLAQMRRISLFSCAKDRHDFGFPQEEFGNQFQKAETIPVLHEMIQQIFNLFSTKDSSAAWDETLLDKFYTELYQQLNDLEACVIQGVGVTETPLMKEDSILAVRKYFQRITLYLKEKKYSPCAWEVVRAEIMRSFSLSTNLQESLRSKE

SEQ ID NO: 25 - protein, 165 aa, Artificial Sequence
  K31A Mutant IFN-alpha 2b
CDLPQTHSLGSRRTLMLLAQMRRISLFSCLADRHDFGFPQEEFGNQFQKAETIPVLHEMIQQIFNLFSTKDSSAAWDETLLDKFYTELYQQLNDLEACVIQGVGVTETPLMKEDSILAVRKYFQRITLYLKEKKYSPCAWEVVRAEIMRSFSLSTNLQESLRSKE

SEQ ID NO: 26 - protein, 165 aa, Artificial Sequence
  D32A Mutant IFN-alpha 2b
CDLPQTHSLGSRRTLMLLAQMRRISLFSCLKARHDFGFPQEEFGNQFQKAETIPVLHEMIQQIFNLFSTKDSSAAWDETLLDKFYTELYQQLNDLEACVIQGVGVTETPLMKEDSILAVRKYFQRITLYLKEKKYSPCAWEVVRAEIMRSFSLSTNLQESLRSKE

SEQ ID NO: 27 - protein, 165 aa, Artificial Sequence
  R33A Mutant IFN-alpha 2b
CDLPQTHSLGSRRTLMLLAQMRRISLFSCLKDAHDFGFPQEEFGNQFQKAETIPVLHEMIQQIFNLFSTKDSSAAWDETLLDKFYTELYQQLNDLEACVIQGVGVTETPLMKEDSILAVRKYFQRITLYLKEKKYSPCAWEVVRAEIMRSFSLSTNLQESLRSKE

SEQ ID NO: 28 - protein, 165 aa, Artificial Sequence
  D35A Mutant IFN-alpha 2b
CDLPQTHSLGSRRTLMLLAQMRRISLFSCLKDRHAFGFPQEEFGNQFQKAETIPVLHEMIQQIFNLFSTKDSSAAWDETLLDKFYTELYQQLNDLEACVIQGVGVTETPLMKEDSILAVRKYFQRITLYLKEKKYSPCAWEVVRAEIMRSFSLSTNLQESLRSKE

SEQ ID NO: 29 - protein, 165 aa, Artificial Sequence
  G37A Mutant IFN-alpha 2b
CDLPQTHSLGSRRTLMLLAQMRRISLFSCLKDRHDFAFPQEEFGNQFQKAETIPVLHEMIQQIFNLFSTKDSSAAWDETLLDKFYTELYQQLNDLEACVIQGVGVTETPLMKEDSILAVRKYFQRITLYLKEKKYSPCAWEVVRAEIMRSFSLSTNLQESLRSKE

SEQ ID NO: 30 - protein, 165 aa, Artificial Sequence
  P39A Mutant IFN-alpha 2b
CDLPQTHSLGSRRTLMLLAQMRRISLFSCLKDRHDFGFAQEEFGNQFQKAETIPVLHEMIQQIFNLFSTKDSSAAWDETLLDKFYTELYQQLNDLEACVIQGVGVTETPLMKEDSILAVRKYFQRITLYLKEKKYSPCAWEVVRAEIMRSFSLSTNLQESLRSKE

SEQ ID NO: 31 - protein, 165 aa, Artificial Sequence
  E41A Mutant IFN-alpha 2b
CDLPQTHSLGSRRTLMLLAQMRRISLFSCLKDRHDFGFPQAEFGNQFQKAETIPVLHEMIQQIFNLFSTKDSSAAWDETLLDKFYTELYQQLNDLEACVIQGVGVTETPLMKEDSILAVRKYFQRITLYLKEKKYSPCAWEVVRAEIMRSFSLSTNLQESLRSKE

SEQ ID NO: 32 - protein, 165 aa, Artificial Sequence
  E42A Mutant IFN-alpha 2b
CDLPQTHSLGSRRTLMLLAQMRRISLFSCLKDRHDFGFPQEAFGNQFQKAETIPVLHEMIQQIFNLFSTKDSSAAWDETLLDKFYTELYQQLNDLEACVIQGVGVTETPLMKEDSILAVRKYFQRITLYLKEKKYSPCAWEVVRAEIMRSFSLSTNLQESLRSKE

SEQ ID NO: 33 - protein, 165 aa, Artificial Sequence
  F43A Mutant IFN-alpha 2b
CDLPQTHSLGSRRTLMLLAQMRRISLFSCLKDRHDFGFPQEEAGNQFQKAETIPVLHEMIQQIFNLFSTKDSSAAWDETLLDKFYTELYQQLNDLEACVIQGVGVTETPLMKEDSILAVRKYFQRITLYLKEKKYSPCAWEVVRAEIMRSFSLSTNLQESLRSKE

SEQ ID NO: 34 - protein, 165 aa, Artificial Sequence
  N45A Mutant IFN-alpha 2b
CDLPQTHSLGSRRTLMLLAQMRRISLFSCLKDRHDFGFPQEEFGAQFQKAETIPVLHEMIQQIFNLFSTKDSSAAWDETLLDKFYTELYQQLNDLEACVIQGVGVTETPLMKEDSILAVRKYFQRITLYLKEKKYSPCAWEVVRAEIMRSFSLSTNLQESLRSKE

SEQ ID NO: 35 - protein, 165 aa, Artificial Sequence
  F47A Mutant IFN-alpha 2b
CDLPQTHSLGSRRTLMLLAQMRRISLFSCLKDRHDFGFPQEEFGNQAQKAETIPVLHEMIQQIFNLFSTKDSSAAWDETLLDKFYTELYQQLNDLEACVIQGVGVTETPLMKEDSILAVRKYFQRITLYLKEKKYSPCAWEVVRAEIMRSFSLSTNLQESLRSKE

SEQ ID NO: 36 - protein, 165 aa, Artificial Sequence
  E51A Mutant IFN-alpha 2b
CDLPQTHSLGSRRTLMLLAQMRRISLFSCLKDRHDFGFPQEEFGNQFQKAATIPVLHEMIQQIFNLFSTKDSSAAWDETLLDKFYTELYQQLNDLEACVIQGVGVTETPLMKEDSILAVRKYFQRITLYLKEKKYSPCAWEVVRAEIMRSFSLSTNLQESLRSKE

SEQ ID NO: 37 - protein, 165 aa, Artificial Sequence
  T52A Mutant IFN-alpha 2b
CDLPQTHSLGSRRTLMLLAQMRRISLFSCLKDRHDFGFPQEEFGNQFQKAEAIPVLHEMIQQIFNLFSTKDSSAAWDETLLDKFYTELYQQLNDLEACVIQGVGVTETPLMKEDSILAVRKYFQRITLYLKEKKYSPCAWEVVRAEIMRSFSLSTNLQESLRSKE

SEQ ID NO: 38 - protein, 165 aa, Artificial Sequence
  I53A Mutant IFN-alpha 2b
CDLPQTHSLGSRRTLMLLAQMRRISLFSCLKDRHDFGFPQEEFGNQFQKAETAPVLHEMIQQIFNLFSTKDSSAAWDETLLDKFYTELYQQLNDLEACVIQGVGVTETPLMKEDSILAVRKYFQRITLYLKEKKYSPCAWEVVRAEIMRSFSLSTNLQESLRSKE

SEQ ID NO: 39 - protein, 165 aa, Artificial Sequence
  P54A Mutant IFN-alpha 2b
CDLPQTHSLGSRRTLMLLAQMRRISLFSCLKDRHDFGFPQEEFGNQFQKAETIAVLHEMIQQIFNLFSTKDSSAAWDETLLDKFYTELYQQLNDLEACVIQGVGVTETPLMKEDSILAVRKYFQRITLYLKEKKYSPCAWEVVRAEIMRSFSLSTNLQESLRSKE

SEQ ID NO: 40 - protein, 165 aa, Artificial Sequence
  V55A Mutant IFN-alpha 2b
CDLPQTHSLGSRRTLMLLAQMRRISLFSCLKDRHDFGFPQEEFGNQFQKAETIPALHEMIQQIFNLFSTKDSSAAWDETLLDKFYTELYQQLNDLEACVIQGVGVTETPLMKEDSILAVRKYFQRITLYLKEKKYSPCAWEVVRAEIMRSFSLSTNLQESLRSKE

SEQ ID NO: 41 - protein, 165 aa, Artificial Sequence
  L56A Mutant IFN-alpha 2b
CDLPQTHSLGSRRTLMLLAQMRRISLFSCLKDRHDFGFPQEEFGNQFQKAETIPVAHEMIQQIFNLFSTKDSSAAWDETLLDKFYTELYQQLNDLEACVIQGVGVTETPLMKEDSILAVRKYFQRITLYLKEKKYSPCAWEVVRAEIMRSFSLSTNLQESLRSKE

SEQ ID NO: 42 - protein, 165 aa, Artificial Sequence
  H57A Mutant IFN-alpha 2b
CDLPQTHSLGSRRTLMLLAQMRRISLFSCLKDRHDFGFPQEEFGNQFQKAETIPVLAEMIQQIFNLFSTKDSSAAWDETLLDKFYTELYQQLNDLEACVIQGVGVTETPLMKEDSILAVRKYFQRITLYLKEKKYSPCAWEVVRAEIMRSFSLSTNLQESLRSKE

SEQ ID NO: 43 - protein, 165 aa, Artificial Sequence
  E58A Mutant IFN-alpha 2b
CDLPQTHSLGSRRTLMLLAQMRRISLFSCLKDRHDFGFPQEEFGNQFQKAETIPVLHAMIQQIFNLFSTKDSSAAWDETLLDKFYTELYQQLNDLEACVIQGVGVTETPLMKEDSILAVRKYFQRITLYLKEKKYSPCAWEVVRAEIMRSFSLSTNLQESLRSKE

SEQ ID NO: 44 - protein, 165 aa, Artificial Sequence
  M59A Mutant IFN-alpha 2b
CDLPQTHSLGSRRTLMLLAQMRRISLFSCLKDRHDFGFPQEEFGNQFQKAETIPVLHEAIQQIFNLFSTKDSSAAWDETLLDKFYTELYQQLNDLEACVIQGVGVTETPLMKEDSILAVRKYFQRITLYLKEKKYSPCAWEVVRAEIMRSFSLSTNLQESLRSKE

SEQ ID NO: 45 - protein, 165 aa, Artificial Sequence
  I60A Mutant IFN-alpha 2b
CDLPQTHSLGSRRTLMLLAQMRRISLFSCLKDRHDFGFPQEEFGNQFQKAETIPVLHEMAQQIFNLFSTKDSSAAWDETLLDKFYTELYQQLNDLEACVIQGVGVTETPLMKEDSILAVRKYFQRITLYLKEKKYSPCAWEVVRAEIMRSFSLSTNLQESLRSKE

SEQ ID NO: 46 - protein, 165 aa, Artificial Sequence
  I63A Mutant IFN-alpha 2b
CDLPQTHSLGSRRTLMLLAQMRRISLFSCLKDRHDFGFPQEEFGNQFQKAETIPVLHEMIQQAFNLFSTKDSSAAWDETLLDKFYTELYQQLNDLEACVIQGVGVTETPLMKEDSILAVRKYFQRITLYLKEKKYSPCAWEVVRAEIMRSFSLSTNLQESLRSKE

SEQ ID NO: 47 - protein, 165 aa, Artificial Sequence
  F64A Mutant IFN-alpha 2b
CDLPQTHSLGSRRTLMLLAQMRRISLFSCLKDRHDFGFPQEEFGNQFQKAETIPVLHEMIQQIANLFSTKDSSAAWDETLLDKFYTELYQQLNDLEACVIQGVGVTETPLMKEDSILAVRKYFQRITLYLKEKKYSPCAWEVVRAEIMRSFSLSTNLQESLRSKE

SEQ ID NO: 48 - protein, 165 aa, Artificial Sequence
  N65A Mutant IFN-alpha 2b
CDLPQTHSLGSRRTLMLLAQMRRISLFSCLKDRHDFGFPQEEFGNQFQKAETIPVLHEMIQQIFALFSTKDSSAAWDETLLDKFYTELYQQLNDLEACVIQGVGVTETPLMKEDSILAVRKYFQRITLYLKEKKYSPCAWEVVRAEIMRSFSLSTNLQESLRSKE

SEQ ID NO: 49 - protein, 165 aa, Artificial Sequence
  L66A Mutant IFN-alpha 2b
CDLPQTHSLGSRRTLMLLAQMRRISLFSCLKDRHDFGFPQEEFGNQFQKAETIPVLHEMIQQIFNAFSTKDSSAAWDETLLDKFYTELYQQLNDLEACVIQGVGVTETPLMKEDSILAVRKYFQRITLYLKEKKYSPCAWEVVRAEIMRSFSLSTNLQESLRSKE

SEQ ID NO: 50 - protein, 165 aa, Artificial Sequence
  F67A Mutant IFN-alpha 2b
CDLPQTHSLGSRRTLMLLAQMRRISLFSCLKDRHDFGFPQEEFGNQFQKAETIPVLHEMIQQIFNLASTKDSSAAWDETLLDKFYTELYQQLNDLEACVIQGVGVTETPLMKEDSILAVRKYFQRITLYLKEKKYSPCAWEVVRAEIMRSFSLSTNLQESLRSKE

SEQ ID NO: 51 - protein, 165 aa, Artificial Sequence
  T69A Mutant IFN-alpha 2b
CDLPQTHSLGSRRTLMLLAQMRRISLFSCLKDRHDFGFPQEEFGNQFQKAETIPVLHEMIQQIFNLFSAKDSSAAWDETLLDKFYTELYQQLNDLEACVIQGVGVTETPLMKEDSILAVRKYFQRITLYLKEKKYSPCAWEVVRAEIMRSFSLSTNLQESLRSKE

SEQ ID NO: 52 - protein, 165 aa, Artificial Sequence
  K70A Mutant IFN-alpha 2b
CDLPQTHSLGSRRTLMLLAQMRRISLFSCLKDRHDFGFPQEEFGNQFQKAETIPVLHEMIQQIFNLFSTADSSAAWDETLLDKFYTELYQQLNDLEACVIQGVGVTETPLMKEDSILAVRKYFQRITLYLKEKKYSPCAWEVVRAEIMRSFSLSTNLQESLRSKE

SEQ ID NO: 53 - protein, 165 aa, Artificial Sequence
  D71A Mutant IFN-alpha 2b
CDLPQTHSLGSRRTLMLLAQMRRISLFSCLKDRHDFGFPQEEFGNQFQKAETIPVLHEMIQQIFNLFSTKASSAAWDETLLDKFYTELYQQLNDLEACVIQGVGVTETPLMKEDSILAVRKYFQRITLYLKEKKYSPCAWEVVRAEIMRSFSLSTNLQESLRSKE

SEQ ID NO: 54 - protein, 165 aa, Artificial Sequence
  S72A Mutant IFN-alpha 2b
CDLPQTHSLGSRRTLMLLAQMRRISLFSCLKDRHDFGFPQEEFGNQFQKAETIPVLHEMIQQIFNLFSTKDASAAWDETLLDKFYTELYQQLNDLEACVIQGVGVTETPLMKEDSILAVRKYFQRITLYLKEKKYSPCAWEVVRAEIMRSFSLSTNLQESLRSKE

SEQ ID NO: 55 - protein, 165 aa, Artificial Sequence
  W76A Mutant IFN-alpha 2b
CDLPQTHSLGSRRTLMLLAQMRRISLFSCLKDRHDFGFPQEEFGNQFQKAETIPVLHEMIQQIFNLFSTKDSSAAADETLLDKFYTELYQQLNDLEACVIQGVGVTETPLMKEDSILAVRKYFQRITLYLKEKKYSPCAWEVVRAEIMRSFSLSTNLQESLRSKE

SEQ ID NO: 56 - protein, 165 aa, Artificial Sequence
  D77A Mutant IFN-alpha 2b
CDLPQTHSLGSRRTLMLLAQMRRISLFSCLKDRHDFGFPQEEFGNQFQKAETIPVLHEMIQQIFNLFSTKDSSAAWAETLLDKFYTELYQQLNDLEACVIQGVGVTETPLMKEDSILAVRKYFQRITLYLKEKKYSPCAWEVVRAEIMRSFSLSTNLQESLRSKE

SEQ ID NO: 57 - protein, 165 aa, Artificial Sequence
  E78A Mutant IFN-alpha 2b
CDLPQTHSLGSRRTLMLLAQMRRISLFSCLKDRHDFGFPQEEFGNQFQKAETIPVLHEMIQQIFNLFSTKDSSAAWDATLLDKFYTELYQQLNDLEACVIQGVGVTETPLMKEDSILAVRKYFQRITLYLKEKKYSPCAWEVVRAEIMRSFSLSTNLQESLRSKE

SEQ ID NO: 58 - protein, 165 aa, Artificial Sequence
  L81A Mutant IFN-alpha 2b
CDLPQTHSLGSRRTLMLLAQMRRISLFSCLKDRHDFGFPQEEFGNQFQKAETIPVLHEMIQQIFNLFSTKDSSAAWDETLADKFYTELYQQLNDLEACVIQGVGVTETPLMKEDSILAVRKYFQRITLYLKEKKYSPCAWEVVRAEIMRSFSLSTNLQESLRSKE

SEQ ID NO: 59 - protein, 165 aa, Artificial Sequence
  D82A Mutant IFN-alpha 2b
CDLPQTHSLGSRRTLMLLAQMRRISLFSCLKDRHDFGFPQEEFGNQFQKAETIPVLHEMIQQIFNLFSTKDSSAAWDETLLAKFYTELYQQLNDLEACVIQGVGVTETPLMKEDSILAVRKYFQRITLYLKEKKYSPCAWEVVRAEIMRSFSLSTNLQESLRSKE

SEQ ID NO: 60 - protein, 165 aa, Artificial Sequence
  K83A Mutant IFN-alpha 2b
CDLPQTHSLGSRRTLMLLAQMRRISLFSCLKDRHDFGFPQEEFGNQFQKAETIPVLHEMIQQIFNLFSTKDSSAAWDETLLDAFYTELYQQLNDLEACVIQGVGVTETPLMKEDSILAVRKYFQRITLYLKEKKYSPCAWEVVRAEIMRSFSLSTNLQESLRSKE

SEQ ID NO: 61 - protein, 165 aa, Artificial Sequence
  F84A Mutant IFN-alpha 2b
CDLPQTHSLGSRRTLMLLAQMRRISLFSCLKDRHDFGFPQEEFGNQFQKAETIPVLHEMIQQIFNLFSTKDSSAAWDETLLDKAYTELYQQLNDLEACVIQGVGVTETPLMKEDSILAVRKYFQRITLYLKEKKYSPCAWEVVRAEIMRSFSLSTNLQESLRSKE

SEQ ID NO: 62 - protein, 165 aa, Artificial Sequence
  Y85A Mutant IFN-alpha 2b
CDLPQTHSLGSRRTLMLLAQMRRISLFSCLKDRHDFGFPQEEFGNQFQKAETIPVLHEMIQQIFNLFSTKDSSAAWDETLLDKFATELYQQLNDLEACVIQGVGVTETPLMKEDSILAVRKYFQRITLYLKEKKYSPCAWEVVRAEIMRSFSLSTNLQESLRSKE

SEQ ID NO: 63 - protein, 165 aa, Artificial Sequence
  Y89A Mutant IFN-alpha 2b
CDLPQTHSLGSRRTLMLLAQMRRISLFSCLKDRHDFGFPQEEFGNQFQKAETIPVLHEMIQQIFNLFSTKDSSAAWDETLLDKFYTELAQQLNDLEACVIQGVGVTETPLMKEDSILAVRKYFQRITLYLKEKKYSPCAWEVVRAEIMRSFSLSTNLQESLRSKE

SEQ ID NO: 64 - protein, 165 aa, Artificial Sequence
  Q90A Mutant IFN-alpha 2b
CDLPQTHSLGSRRTLMLLAQMRRISLFSCLKDRHDFGFPQEEFGNQFQKAETIPVLHEMIQQIFNLFSTKDSSAAWDETLLDKFYTELYAQLNDLEACVIQGVGVTETPLMKEDSILAVRKYFQRITLYLKEKKYSPCAWEVVRAEIMRSFSLSTNLQESLRSKE

SEQ ID NO: 65 - protein, 165 aa, Artificial Sequence
  Q91A Mutant IFN-alpha 2b
CDLPQTHSLGSRRTLMLLAQMRRISLFSCLKDRHDFGFPQEEFGNQFQKAETIPVLHEMIQQIFNLFSTKDSSAAWDETLLDKFYTELYQALNDLEACVIQGVGVTETPLMKEDSILAVRKYFQRITLYLKEKKYSPCAWEVVRAEIMRSFSLSTNLQESLRSKE

SEQ ID NO: 66 - protein, 165 aa, Artificial Sequence
  N93A Mutant IFN-alpha 2b
CDLPQTHSLGSRRTLMLLAQMRRISLFSCLKDRHDFGFPQEEFGNQFQKAETIPVLHEMIQQIFNLFSTKDSSAAWDETLLDKFYTELYQQLADLEACVIQGVGVTETPLMKEDSILAVRKYFQRITLYLKEKKYSPCAWEVVRAEIMRSFSLSTNLQESLRSKE

SEQ ID NO: 67 - protein, 165 aa, Artificial Sequence
  D94A Mutant IFN-alpha 2b
CDLPQTHSLGSRRTLMLLAQMRRISLFSCLKDRHDFGFPQEEFGNQFQKAETIPVLHEMIQQIFNLFSTKDSSAAWDETLLDKFYTELYQQLNALEACVIQGVGVTETPLMKEDSILAVRKYFQRITLYLKEKKYSPCAWEVVRAEIMRSFSLSTNLQESLRSKE

SEQ ID NO: 68 - protein, 165 aa, Artificial Sequence
  C98A Mutant IFN-alpha 2b
CDLPQTHSLGSRRTLMLLAQMRRISLFSCLKDRHDFGFPQEEFGNQFQKAETIPVLHEMIQQIFNLFSTKDSSAAWDETLLDKFYTELYQQLNDLEAAVIQGVGVTETPLMKEDSILAVRKYFQRITLYLKEKKYSPCAWEVVRAEIMRSFSLSTNLQESLRSKE

SEQ ID NO: 69 - protein, 165 aa, Artificial Sequence
  V99A Mutant IFN-alpha 2b
CDLPQTHSLGSRRTLMLLAQMRRISLFSCLKDRHDFGFPQEEFGNQFQKAETIPVLHEMIQQIFNLFSTKDSSAAWDETLLDKFYTELYQQLNDLEACAIQGVGVTETPLMKEDSILAVRKYFQRITLYLKEKKYSPCAWEVVRAEIMRSFSLSTNLQESLRSKE

SEQ ID NO: 70 - protein, 165 aa, Artificial Sequence
  G104A Mutant IFN-alpha 2b
CDLPQTHSLGSRRTLMLLAQMRRISLFSCLKDRHDFGFPQEEFGNQFQKAETIPVLHEMIQQIFNLFSTKDSSAAWDETLLDKFYTELYQQLNDLEACVIQGVAVTETPLMKEDSILAVRKYFQRITLYLKEKKYSPCAWEVVRAEIMRSFSLSTNLQESLRSKE

SEQ ID NO: 71 - protein, 165 aa, Artificial Sequence
  L110A Mutant IFN-alpha 2b
CDLPQTHSLGSRRTLMLLAQMRRISLFSCLKDRHDFGFPQEEFGNQFQKAETIPVLHEMIQQIFNLFSTKDSSAAWDETLLDKFYTELYQQLNDLEACVIQGVGVTETPAMKEDSILAVRKYFQRITLYLKEKKYSPCAWEVVRAEIMRSFSLSTNLQESLRSKE

SEQ ID NO: 72 - protein, 165 aa, Artificial Sequence
  S115A Mutant IFN-alpha 2b
CDLPQTHSLGSRRTLMLLAQMRRISLFSCLKDRHDFGFPQEEFGNQFQKAETIPVLHEMIQQIFNLFSTKDSSAAWDETLLDKFYTELYQQLNDLEACVIQGVGVTETPLMKEDAILAVRKYFQRITLYLKEKKYSPCAWEVVRAEIMRSFSLSTNLQESLRSKE

SEQ ID NO: 73 - protein, 165 aa, Artificial Sequence
  Y122A Mutant IFN-alpha 2b
CDLPQTHSLGSRRTLMLLAQMRRISLFSCLKDRHDFGFPQEEFGNQFQKAETIPVLHEMIQQIFNLFSTKDSSAAWDETLLDKFYTELYQQLNDLEACVIQGVGVTETPLMKEDSILAVRKAFQRITLYLKEKKYSPCAWEVVRAEIMRSFSLSTNLQESLRSKE

SEQ ID NO: 74 - protein, 165 aa, Artificial Sequence
  W140A Mutant IFN-alpha 2b
CDLPQTHSLGSRRTLMLLAQMRRISLFSCLKDRHDFGFPQEEFGNQFQKAETIPVLHEMIQQIFNLFSTKDSSAAWDETLLDKFYTELYQQLNDLEACVIQGVGVTETPLMKEDSILAVRKYFQRITLYLKEKKYSPCAAEVVRAEIMRSFSLSTNLQESLRSKE

SEQ ID NO: 75 - protein, 165 aa, Artificial Sequence
  E146A Mutant IFN-alpha 2b
CDLPQTHSLGSRRTLMLLAQMRRISLFSCLKDRHDFGFPQEEFGNQFQKAETIPVLHEMIQQIFNLFSTKDSSAAWDETLLDKFYTELYQQLNDLEACVIQGVGVTETPLMKEDSILAVRKYFQRITLYLKEKKYSPCAWEVVRAAIMRSFSLSTNLQESLRSKE

SEQ ID NO: 76 - protein, 165 aa, Artificial Sequence
  L3V Mutant IFN-alpha 2b
CDVPQTHSLGSRRTLMLLAQMRRISLFSCLKDRHDFGFPQEEFGNQFQKAETIPVLHEMIQQIFNLFSTKDSSAAWDETLLDKFYTELYQQLNDLEACVIQGVGVTETPLMKEDSILAVRKYFQRITLYLKEKKYSPCAWEVVRAEIMRSFSLSTNLQESLRSKE

SEQ ID NO: 77 - protein, 165 aa, Artificial Sequence
  R12H Mutant IFN-alpha 2b
CDLPQTHSLGSHRTLMLLAQMRRISLFSCLKDRHDFGFPQEEFGNQFQKAETIPVLHEMIQQIFNLFSTKDSSAAWDETLLDKFYTELYQQLNDLEACVIQGVGVTETPLMKEDSILAVRKYFQRITLYLKEKKYSPCAWEVVRAEIMRSFSLSTNLQESLRSKE

SEQ ID NO: 78 - protein, 165 aa, Artificial Sequence
  R13H Mutant IFN-alpha 2b
CDLPQTHSLGSRHTLMLLAQMRRISLFSCLKDRHDFGFPQEEFGNQFQKAETIPVLHEMIQQIFNLFSTKDSSAAWDETLLDKFYTELYQQLNDLEACVIQGVGVTETPLMKEDSILAVRKYFQRITLYLKEKKYSPCAWEVVRAEIMRSFSLSTNLQESLRSKE

SEQ ID NO: 79 - protein, 165 aa, Artificial Sequence
  M16V Mutant IFN-alpha 2b
CDLPQTHSLGSRRTLVLLAQMRRISLFSCLKDRHDFGFPQEEFGNQFQKAETIPVLHEMIQQIFNLFSTKDSSAAWDETLLDKFYTELYQQLNDLEACVIQGVGVTETPLMKEDSILAVRKYFQRITLYLKEKKYSPCAWEVVRAEIMRSFSLSTNLQESLRSKE

SEQ ID NO: 80 - protein, 165 aa, Artificial Sequence
  M16I Mutant IFN-alpha 2b
CDLPQTHSLGSRRTLILLAQMRRISLFSCLKDRHDFGFPQEEFGNQFQKAETIPVLHEMIQQIFNLFSTKDSSAAWDETLLDKFYTELYQQLNDLEACVIQGVGVTETPLMKEDSILAVRKYFQRITLYLKEKKYSPCAWEVVRAEIMRSFSLSTNLQESLRSKE

SEQ ID NO: 81 - protein, 165 aa, Artificial Sequence
  R22H Mutant IFN-alpha 2b
CDLPQTHSLGSRRTLMLLAQMHRISLFSCLKDRHDFGFPQEEFGNQFQKAETIPVLHEMIQQIFNLFSTKDSSAAWDETLLDKFYTELYQQLNDLEACVIQGVGVTETPLMKEDSILAVRKYFQRITLYLKEKKYSPCAWEVVRAEIMRSFSLSTNLQESLRSKE

SEQ ID NO: 82 - protein, 165 aa, Artificial Sequence
  F27I Mutant IFN-alpha 2b
CDLPQTHSLGSRRTLMLLAQMRRISLISCLKDRHDFGFPQEEFGNQFQKAETIPVLHEMIQQIFNLFSTKDSSAAWDETLLDKFYTELYQQLNDLEACVIQGVGVTETPLMKEDSILAVRKYFQRITLYLKEKKYSPCAWEVVRAEIMRSFSLSTNLQESLRSKE

SEQ ID NO: 83 - protein, 165 aa, Artificial Sequence
  F27V Mutant IFN-alpha 2b
CDLPQTHSLGSRRTLMLLAQMRRISLVSCLKDRHDFGFPQEEFGNQFQKAETIPVLHEMIQQIFNLFSTKDSSAAWDETLLDKFYTELYQQLNDLEACVIQGVGVTETPLMKEDSILAVRKYFQRITLYLKEKKYSPCAWEVVRAEIMRSFSLSTNLQESLRSKE

SEQ ID NO: 84 - protein, 165 aa, Artificial Sequence
  L30I Mutant IFN-alpha 2b
CDLPQTHSLGSRRTLMLLAQMRRISLFSCIKDRHDFGFPQEEFGNQFQKAETIPVLHEMIQQIFNLFSTKDSSAAWDETLLDKFYTELYQQLNDLEACVIQGVGVTETPLMKEDSILAVRKYFQRITLYLKEKKYSPCAWEVVRAEIMRSFSLSTNLQESLRSKE

SEQ ID NO: 85 - protein, 165 aa, Artificial Sequence
  K31Q Mutant IFN-alpha 2b
CDLPQTHSLGSRRTLMLLAQMRRISLFSCLQDRHDFGFPQEEFGNQFQKAETIPVLHEMIQQIFNLFSTKDSSAAWDETLLDKFYTELYQQLNDLEACVIQGVGVTETPLMKEDSILAVRKYFQRITLYLKEKKYSPCAWEVVRAEIMRSFSLSTNLQESLRSKE

SEQ ID NO: 86 - protein, 165 aa, Artificial Sequence
  R33H Mutant IFN-alpha 2b
CDLPQTHSLGSRRTLMLLAQMRRISLFSCLKDHHDFGFPQEEFGNQFQKAETIPVLHEMIQQIFNLFSTKDSSAAWDETLLDKFYTELYQQLNDLEACVIQGVGVTETPLMKEDSILAVRKYFQRITLYLKEKKYSPCAWEVVRAEIMRSFSLSTNLQESLRSKE

SEQ ID NO: 87 - protein, 165 aa, Artificial Sequence
  E41Q Mutant IFN-alpha 2b
CDLPQTHSLGSRRTLMLLAQMRRISLFSCLKDRHDFGFPQQEFGNQFQKAETIPVLHEMIQQIFNLFSTKDSSAAWDETLLDKFYTELYQQLNDLEACVIQGVGVTETPLMKEDSILAVRKYFQRITLYLKEKKYSPCAWEVVRAEIMRSFSLSTNLQESLRSKE

SEQ ID NO: 88 - protein, 165 aa, Artificial Sequence
  E41H Mutant IFN-alpha 2b
CDLPQTHSLGSRRTLMLLAQMRRISLFSCLKDRHDFGFPQHEFGNQFQKAETIPVLHEMIQQIFNLFSTKDSSAAWDETLLDKFYTELYQQLNDLEACVIQGVGVTETPLMKEDSILAVRKYFQRITLYLKEKKYSPCAWEVVRAEIMRSFSLSTNLQESLRSKE

SEQ ID NO: 89 - protein, 165 aa, Artificial Sequence
  E58Q Mutant IFN-alpha 2b
CDLPQTHSLGSRRTLMLLAQMRRISLFSCLKDRHDFGFPQEEFGNQFQKAETIPVLHQMIQQIFNLFSTKDSSAAWDETLLDKFYTELYQQLNDLEACVIQGVGVTETPLMKEDSILAVRKYFQRITLYLKEKKYSPCAWEVVRAEIMRSFSLSTNLQESLRSKE

SEQ ID NO: 90 - protein, 165 aa, Artificial Sequence
  E58H Mutant IFN-alpha 2b
CDLPQTHSLGSRRTLMLLAQMRRISLFSCLKDRHDFGFPQEEFGNQFQKAETIPVLHHMIQQIFNLFSTKDSSAAWDETLLDKFYTELYQQLNDLEACVIQGVGVTETPLMKEDSILAVRKYFQRITLYLKEKKYSPCAWEVVRAEIMRSFSLSTNLQESLRSKE

SEQ ID NO: 91 - protein, 165 aa, Artificial Sequence
  K70T Mutant IFN-alpha 2b
CDLPQTHSLGSRRTLMLLAQMRRISLFSCLKDRHDFGFPQEEFGNQFQKAETIPVLHEMIQQIFNLFSTTDSSAAWDETLLDKFYTELYQQLNDLEACVIQGVGVTETPLMKEDSILAVRKYFQRITLYLKEKKYSPCAWEVVRAEIMRSFSLSTNLQESLRSKE

SEQ ID NO: 92 - protein, 165 aa, Artificial Sequence
  E78Q Mutant IFN-alpha 2b
CDLPQTHSLGSRRTLMLLAQMRRISLFSCLKDRHDFGFPQEEFGNQFQKAETIPVLHEMIQQIFNLFSTKDSSAAWDQTLLDKFYTELYQQLNDLEACVIQGVGVTETPLMKEDSILAVRKYFQRITLYLKEKKYSPCAWEVVRAEIMRSFSLSTNLQESLRSKE

SEQ ID NO: 93 - protein, 165 aa, Artificial Sequence
  E78H Mutant IFN-alpha 2b
CDLPQTHSLGSRRTLMLLAQMRRISLFSCLKDRHDFGFPQEEFGNQFQKAETIPVLHEMIQQIFNLFSTKDSSAAWDHTLLDKFYTELYQQLNDLEACVIQGVGVTETPLMKEDSILAVRKYFQRITLYLKEKKYSPCAWEVVRAEIMRSFSLSTNLQESLRSKE

SEQ ID NO: 94 - protein, 165 aa, Artificial Sequence
  Y89I Mutant IFN-alpha 2b
CDLPQTHSLGSRRTLMLLAQMRRISLFSCLKDRHDFGFPQEEFGNQFQKAETIPVLHEMIQQIFNLFSTKDSSAAWDETLLDKFYTELIQQLNDLEACVIQGVGVTETPLMKEDSILAVRKYFQRITLYLKEKKYSPCAWEVVRAEIMRSFSLSTNLQESLRSKE

SEQ ID NO: 95 - protein, 165 aa, Artificial Sequence
  E107Q Mutant IFN-alpha 2b
CDLPQTHSLGSRRTLMLLAQMRRISLFSCLKDRHDFGFPQEEFGNQFQKAETIPVLHEMIQQIFNLFSTKDSSAAWDETLLDKFYTELYQQLNDLEACVIQGVGVTQTPLMKEDSILAVRKYFQRITLYLKEKKYSPCAWEVVRAEIMRSFSLSTNLQESLRSKE

SEQ ID NO: 96 - protein, 165 aa, Artificial Sequence
  E107H Mutant IFN-alpha 2b
CDLPQTHSLGSRRTLMLLAQMRRISLFSCLKDRHDFGFPQEEFGNQFQKAETIPVLHEMIQQIFNLFSTKDSSAAWDETLLDKFYTELYQQLNDLEACVIQGVGVTHTPLMKEDSILAVRKYFQRITLYLKEKKYSPCAWEVVRAEIMRSFSLSTNLQESLRSKE

SEQ ID NO: 97 - protein, 165 aa, Artificial Sequence
  P109A Mutant IFN-alpha 2b
CDLPQTHSLGSRRTLMLLAQMRRISLFSCLKDRHDFGFPQEEFGNQFQKAETIPVLHEMIQQIFNLFSTKDSSAAWDETLLDKFYTELYQQLNDLEACVIQGVGVTETALMKEDSILAVRKYFQRITLYLKEKKYSPCAWEVVRAEIMRSFSLSTNLQESLRSKE

SEQ ID NO: 98 - protein, 165 aa, Artificial Sequence
  L110V Mutant IFN-alpha 2b
CDLPQTHSLGSRRTLMLLAQMRRISLFSCLKDRHDFGFPQEEFGNQFQKAETIPVLHEMIQQIFNLFSTKDSSAAWDETLLDKFYTELYQQLNDLEACVIQGVGVTETPVMKEDSILAVRKYFQRITLYLKEKKYSPCAWEVVRAEIMRSFSLSTNLQESLRSKE

SEQ ID NO: 99 - protein, 165 aa, Artificial Sequence
  M111I Mutant IFN-alpha 2b
CDLPQTHSLGSRRTLMLLAQMRRISLFSCLKDRHDFGFPQEEFGNQFQKAETIPVLHEMIQQIFNLFSTKDSSAAWDETLLDKFYTELYQQLNDLEACVIQGVGVTETPLIKEDSILAVRKYFQRITLYLKEKKYSPCAWEVVRAEIMRSFSLSTNLQESLRSKE

SEQ ID NO: 100 - protein, 165 aa, Artificial Sequence
  E113Q Mutant IFN-alpha 2b
CDLPQTHSLGSRRTLMLLAQMRRISLFSCLKDRHDFGFPQEEFGNQFQKAETIPVLHEMIQQIFNLFSTKDSSAAWDETLLDKFYTELYQQLNDLEACVIQGVGVTETPLMKQDSILAVRKYFQRITLYLKEKKYSPCAWEVVRAEIMRSFSLSTNLQESLRSKE

SEQ ID NO: 101 - protein, 165 aa, Artificial Sequence
  E113H Mutant IFN-alpha 2b
CDLPQTHSLGSRRTLMLLAQMRRISLFSCLKDRHDFGFPQEEFGNQFQKAETIPVLHEMIQQIFNLFSTKDSSAAWDETLLDKFYTELYQQLNDLEACVIQGVGVTETPLMKHDSILAVRKYFQRITLYLKEKKYSPCAWEVVRAEIMRSFSLSTNLQESLRSKE

SEQ ID NO: 102 - protein, 165 aa, Artificial Sequence
  L117V Mutant IFN-alpha 2b
CDLPQTHSLGSRRTLMLLAQMRRISLFSCLKDRHDFGFPQEEFGNQFQKAETIPVLHEMIQQIFNLFSTKDSSAAWDETLLDKFYTELYQQLNDLEACVIQGVGVTETPLMKEDSIVAVRKYFQRITLYLKEKKYSPCAWEVVRAEIMRSFSLSTNLQESLRSKE

SEQ ID NO: 103 - protein, 165 aa, Artificial Sequence
  L117I Mutant IFN-alpha 2b
CDLPQTHSLGSRRTLMLLAQMRRISLFSCLKDRHDFGFPQEEFGNQFQKAETIPVLHEMIQQIFNLFSTKDSSAAWDETLLDKFYTELYQQLNDLEACVIQGVGVTETPLMKEDSIIAVRKYFQRITLYLKEKKYSPCAWEVVRAEIMRSFSLSTNLQESLRSKE

SEQ ID NO: 104 - protein, 165 aa, Artificial Sequence
  K121Q Mutant IFN-alpha 2b
CDLPQTHSLGSRRTLMLLAQMRRISLFSCLKDRHDFGFPQEEFGNQFQKAETIPVLHEMIQQIFNLFSTKDSSAAWDETLLDKFYTELYQQLNDLEACVIQGVGVTETPLMKEDSILAVRQYFQRITLYLKEKKYSPCAWEVVRAEIMRSFSLSTNLQESLRSKE

SEQ ID NO: 105 - protein, 165 aa, Artificial Sequence
  K121T Mutant IFN-alpha 2b
CDLPQTHSLGSRRTLMLLAQMRRISLFSCLKDRHDFGFPQEEFGNQFQKAETIPVLHEMIQQIFNLFSTKDSSAAWDETLLDKFYTELYQQLNDLEACVIQGVGVTETPLMKEDSILAVRTYFQRITLYLKEKKYSPCAWEVVRAEIMRSFSLSTNLQESLRSKE

SEQ ID NO: 106 - protein, 165 aa, Artificial Sequence
  R125H Mutant IFN-alpha 2b
CDLPQTHSLGSRRTLMLLAQMRRISLFSCLKDRHDFGFPQEEFGNQFQKAETIPVLHEMIQQIFNLFSTKDSSAAWDETLLDKFYTELYQQLNDLEACVIQGVGVTETPLMKEDSILAVRKYFQHITLYLKEKKYSPCAWEVVRAEIMRSFSLSTNLQESLRSKE

SEQ ID NO: 107 - protein, 165 aa, Artificial Sequence
  R125Q Mutant IFN-alpha 2b
CDLPQTHSLGSRRTLMLLAQMRRISLFSCLKDRHDFGFPQEEFGNQFQKAETIPVLHEMIQQIFNLFSTKDSSAAWDETLLDKFYTELYQQLNDLEACVIQGVGVTETPLMKEDSILAVRKYFQQITLYLKEKKYSPCAWEVVRAEIMRSFSLSTNLQESLRSKE

SEQ ID NO: 108 - protein, 165 aa, Artificial Sequence
  L128V Mutant IFN-alpha 2b
CDLPQTHSLGSRRTLMLLAQMRRISLFSCLKDRHDFGFPQEEFGNQFQKAETIPVLHEMIQQIFNLFSTKDSSAAWDETLLDKFYTELYQQLNDLEACVIQGVGVTETPLMKEDSILAVRKYFQRITVYLKEKKYSPCAWEVVRAEIMRSFSLSTNLQESLRSKE

SEQ ID NO: 109 - protein, 165 aa, Artificial Sequence
  L128I Mutant IFN-alpha 2b
CDLPQTHSLGSRRTLMLLAQMRRISLFSCLKDRHDFGFPQEEFGNQFQKAETIPVLHEMIQQIFNLFSTKDSSAAWDETLLDKFYTELYQQLNDLEACVIQGVGVTETPLMKEDSILAVRKYFQRITIYLKEKKYSPCAWEVVRAEIMRSFSLSTNLQESLRSKE

SEQ ID NO: 110 - protein, 165 aa, Artificial Sequence
  K131Q Mutant IFN-alpha 2b
CDLPQTHSLGSRRTLMLLAQMRRISLFSCLKDRHDFGFPQEEFGNQFQKAETIPVLHEMIQQIFNLFSTKDSSAAWDETLLDKFYTELYQQLNDLEACVIQGVGVTETPLMKEDSILAVRKYFQRITLYLQEKKYSPCAWEVVRAEIMRSFSLSTNLQESLRSKE

SEQ ID NO: 111 - protein, 165 aa, Artificial Sequence
  K131T Mutant IFN-alpha 2b
CDLPQTHSLGSRRTLMLLAQMRRISLFSCLKDRHDFGFPQEEFGNQFQKAETIPVLHEMIQQIFNLFSTKDSSAAWDETLLDKFYTELYQQLNDLEACVIQGVGVTETPLMKEDSILAVRKYFQRITLYLTEKKYSPCAWEVVRAEIMRSFSLSTNLQESLRSKE

SEQ ID NO: 112 - protein, 165 aa, Artificial Sequence
  E132Q Mutant IFN-alpha 2b
CDLPQTHSLGSRRTLMLLAQMRRISLFSCLKDRHDFGFPQEEFGNQFQKAETIPVLHEMIQQIFNLFSTKDSSAAWDETLLDKFYTELYQQLNDLEACVIQGVGVTETPLMKEDSILAVRKYFQRITLYLKQKKYSPCAWEVVRAEIMRSFSLSTNLQESLRSKE

SEQ ID NO: 113 - protein, 165 aa, Artificial Sequence
  E132H Mutant IFN-alpha 2b
CDLPQTHSLGSRRTLMLLAQMRRISLFSCLKDRHDFGFPQEEFGNQFQKAETIPVLHEMIQQIFNLFSTKDSSAAWDETLLDKFYTELYQQLNDLEACVIQGVGVTETPLMKEDSILAVRKYFQRITLYLKHKKYSPCAWEVVRAEIMRSFSLSTNLQESLRSKE

SEQ ID NO: 114 - protein, 165 aa, Artificial Sequence
  K133Q Mutant IFN-alpha 2b
CDLPQTHSLGSRRTLMLLAQMRRISLFSCLKDRHDFGFPQEEFGNQFQKAETIPVLHEMIQQIFNLFSTKDSSAAWDETLLDKFYTELYQQLNDLEACVIQGVGVTETPLMKEDSILAVRKYFQRITLYLKEQKYSPCAWEVVRAEIMRSFSLSTNLQESLRSKE

SEQ ID NO: 115 - protein, 165 aa, Artificial Sequence
  K133T Mutant IFN-alpha 2b
CDLPQTHSLGSRRTLMLLAQMRRISLFSCLKDRHDFGFPQEEFGNQFQKAETIPVLHEMIQQIFNLFSTKDSSAAWDETLLDKFYTELYQQLNDLEACVIQGVGVTETPLMKEDSILAVRKYFQRITLYLKETKYSPCAWEVVRAEIMRSFSLSTNLQESLRSKE

SEQ ID NO: 116 - protein, 165 aa, Artificial Sequence
  K134Q Mutant IFN-alpha 2b
CDLPQTHSLGSRRTLMLLAQMRRISLFSCLKDRHDFGFPQEEFGNQFQKAETIPVLHEMIQQIFNLFSTKDSSAAWDETLLDKFYTELYQQLNDLEACVIQGVGVTETPLMKEDSILAVRKYFQRITLYLKEKQYSPCAWEVVRAEIMRSFSLSTNLQESLRSKE

SEQ ID NO: 117 - protein, 165 aa, Artificial Sequence
  Y135H Mutant IFN-alpha 2b
CDLPQTHSLGSRRTLMLLAQMRRISLFSCLKDRHDFGFPQEEFGNQFQKAETIPVLHEMIQQIFNLFSTKDSSAAWDETLLDKFYTELYQQLNDLEACVIQGVGVTETPLMKEDSILAVRKYFQRITLYLKEKKHSPCAWEVVRAEIMRSFSLSTNLQESLRSKE

SEQ ID NO: 118 - protein, 165 aa, Artificial Sequence
  Y135I Mutant IFN-alpha 2b
CDLPQTHSLGSRRTLMLLAQMRRISLFSCLKDRHDFGFPQEEFGNQFQKAETIPVLHEMIQQIFNLFSTKDSSAAWDETLLDKFYTELYQQLNDLEACVIQGVGVTETPLMKEDSILAVRKYFQRITLYLKEKKISPCAWEVVRAEIMRSFSLSTNLQESLRSKE

SEQ ID NO: 119 - protein, 165 aa, Artificial Sequence
  P137A Mutant IFN-alpha 2b
CDLPQTHSLGSRRTLMLLAQMRRISLFSCLKDRHDFGFPQEEFGNQFQKAETIPVLHEMIQQIFNLFSTKDSSAAWDETLLDKFYTELYQQLNDLEACVIQGVGVTETPLMKEDSILAVRKYFQRITLYLKEKKYSACAWEVVRAEIMRSFSLSTNLQESLRSKE

SEQ ID NO: 120 - protein, 165 aa, Artificial Sequence
  M148V Mutant IFN-alpha 2b
CDLPQTHSLGSRRTLMLLAQMRRISLFSCLKDRHDFGFPQEEFGNQFQKAETIPVLHEMIQQIFNLFSTKDSSAAWDETLLDKFYTELYQQLNDLEACVIQGVGVTETPLMKEDSILAVRKYFQRITLYLKEKKYSPCAWEVVRAEIVRSFSLSTNLQESLRSKE

SEQ ID NO: 121 - protein, 165 aa, Artificial Sequence
  M148I Mutant IFN-alpha 2b
CDLPQTHSLGSRRTLMLLAQMRRISLFSCLKDRHDFGFPQEEFGNQFQKAETIPVLHEMIQQIFNLFSTKDSSAAWDETLLDKFYTELYQQLNDLEACVIQGVGVTETPLMKEDSILAVRKYFQRITLYLKEKKYSPCAWEVVRAEIIRSFSLSTNLQESLRSKE

SEQ ID NO: 122 - protein, 165 aa, Artificial Sequence
  R149H Mutant IFN-alpha 2b
CDLPQTHSLGSRRTLMLLAQMRRISLFSCLKDRHDFGFPQEEFGNQFQKAETIPVLHEMIQQIFNLFSTKDSSAAWDETLLDKFYTELYQQLNDLEACVIQGVGVTETPLMKEDSILAVRKYFQRITLYLKEKKYSPCAWEVVRAEIMHSFSLSTNLQESLRSKE

SEQ ID NO: 123 - protein, 165 aa, Artificial Sequence
  R149Q Mutant IFN-alpha 2b
CDLPQTHSLGSRRTLMLLAQMRRISLFSCLKDRHDFGFPQEEFGNQFQKAETIPVLHEMIQQIFNLFSTKDSSAAWDETLLDKFYTELYQQLNDLEACVIQGVGVTETPLMKEDSILAVRKYFQRITLYLKEKKYSPCAWEVVRAEIMQSFSLSTNLQESLRSKE

SEQ ID NO: 124 - protein, 165 aa, Artificial Sequence
  E159Q Mutant IFN-alpha 2b
CDLPQTHSLGSRRTLMLLAQMRRISLFSCLKDRHDFGFPQEEFGNQFQKAETIPVLHEMIQQIFNLFSTKDSSAAWDETLLDKFYTELYQQLNDLEACVIQGVGVTETPLMKEDSILAVRKYFQRITLYLKEKKYSPCAWEVVRAEIMRSFSLSTNLQQSLRSKE

SEQ ID NO: 125 - protein, 165 aa, Artificial Sequence
  E159H Mutant IFN-alpha 2b
CDLPQTHSLGSRRTLMLLAQMRRISLFSCLKDRHDFGFPQEEFGNQFQKAETIPVLHEMIQQIFNLFSTKDSSAAWDETLLDKFYTELYQQLNDLEACVIQGVGVTETPLMKEDSILAVRKYFQRITLYLKEKKYSPCAWEVVRAEIMRSFSLSTNLQHSLRSKE

SEQ ID NO: 126 - protein, 165 aa, Artificial Sequence
  P4S Mutant IFN-alpha 2b
CDLSQTHSLGSRRTLMLLAQMRRISLFSCLKDRHDFGFPQEEFGNQFQKAETIPVLHEMIQQIFNLFSTKDSSAAWDETLLDKFYTELYQQLNDLEACVIQGVGVTETPLMKEDSILAVRKYFQRITLYLKEKKYSPCAWEVVRAEIMRSFSLSTNLQESLRSKE

SEQ ID NO: 127 - protein, 165 aa, Artificial Sequence
  Q5N/H7S Mutant IFN-alpha 2b
CDLPNTSSLGSRRTLMLLAQMRRISLFSCLKDRHDFGFPQEEFGNQFQKAETIPVLHEMIQQIFNLFSTKDSSAAWDETLLDKFYTELYQQLNDLEACVIQGVGVTETPLMKEDSILAVRKYFQRITLYLKEKKYSPCAWEVVRAEIMRSFSLSTNLQESLRSKE

SEQ ID NO: 128 - protein, 165 aa, Artificial Sequence
  Q5N/H7T Mutant IFN-alpha 2b
CDLPNTTSLGSRRTLMLLAQMRRISLFSCLKDRHDFGFPQEEFGNQFQKAETIPVLHEMIQQIFNLFSTKDSSAAWDETLLDKFYTELYQQLNDLEACVIQGVGVTETPLMKEDSILAVRKYFQRITLYLKEKKYSPCAWEVVRAEIMRSFSLSTNLQESLRSKE

SEQ ID NO: 129 - protein, 165 aa, Artificial Sequence
  T6N/S8S Mutant IFN-alpha 2b
CDLPQNHSLGSRRTLMLLAQMRRISLFSCLKDRHDFGFPQEEFGNQFQKAETIPVLHEMIQQIFNLFSTKDSSAAWDETLLDKFYTELYQQLNDLEACVIQGVGVTETPLMKEDSILAVRKYFQRITLYLKEKKYSPCAWEVVRAEIMRSFSLSTNLQESLRSKE

SEQ ID NO: 130 - protein, 165 aa, Artificial Sequence
  S8N/G10S Mutant IFN-alpha 2b
CDLPQTHNLSSRRTLMLLAQMRRISLFSCLKDRHDFGFPQEEFGNQFQKAETIPVLHEMIQQIFNLFSTKDSSAAWDETLLDKFYTELYQQLNDLEACVIQGVGVTETPLMKEDSILAVRKYFQRITLYLKEKKYSPCAWEVVRAEIMRSFSLSTNLQESLRSKE

SEQ ID NO: 131 - protein, 165 aa, Artificial Sequence
  S8N/G10T Mutant IFN-alpha 2b
CDLPQTHNLTSRRTLMLLAQMRRISLFSCLKDRHDFGFPQEEFGNQFQKAETIPVLHEMIQQIFNLFSTKDSSAAWDETLLDKFYTELYQQLNDLEACVIQGVGVTETPLMKEDSILAVRKYFQRITLYLKEKKYSPCAWEVVRAEIMRSFSLSTNLQESLRSKE

SEQ ID NO: 132 - protein, 165 aa, Artificial Sequence
  M21N/R23S Mutant IFN-alpha 2b
CDLPQTHSLGSRRTLMLLAQNRSISLFSCLKDRHDFGFPQEEFGNQFQKAETIPVLHEMIQQIFNLFSTKDSSAAWDETLLDKFYTELYQQLNDLEACVIQGVGVTETPLMKEDSILAVRKYFQRITLYLKEKKYSPCAWEVVRAEIMRSFSLSTNLQESLRSKE

SEQ ID NO: 133 - protein, 165 aa, Artificial Sequence
  R23N/S25T Mutant IFN-alpha 2b
CDLPQTHSLGSRRTLMLLAQMRNITLFSCLKDRHDFGFPQEEFGNQFQKAETIPVLHEMIQQIFNLFSTKDSSAAWDETLLDKFYTELYQQLNDLEACVIQGVGVTETPLMKEDSILAVRKYFQRITLYLKEKKYSPCAWEVVRAEIMRSFSLSTNLQESLRSKE

SEQ ID NO: 134 - protein, 165 aa, Artificial Sequence
  I24N/L26S Mutant IFN-alpha 2b
CDLPQTHSLGSRRTLMLLAQMRRNSSFSCLKDRHDFGFPQEEFGNQFQKAETIPVLHEMIQQIFNLFSTKDSSAAWDETLLDKFYTELYQQLNDLEACVIQGVGVTETPLMKEDSILAVRKYFQRITLYLKEKKYSPCAWEVVRAEIMRSFSLSTNLQESLRSKE

SEQ ID NO: 135 - protein, 165 aa, Artificial Sequence
  S25N/F27S Mutant IFN-alpha 2b
CDLPQTHSLGSRRTLMLLAQMRRINLSSCLKDRHDFGFPQEEFGNQFQKAETIPVLHEMIQQIFNLFSTKDSSAAWDETLLDKFYTELYQQLNDLEACVIQGVGVTETPLMKEDSILAVRKYFQRITLYLKEKKYSPCAWEVVRAEIMRSFSLSTNLQESLRSKE

SEQ ID NO: 136 - protein, 165 aa, Artificial Sequence
  S25N/F27T Mutant IFN-alpha 2b
CDLPQTHSLGSRRTLMLLAQMRRINLTSCLKDRHDFGFPQEEFGNQFQKAETIPVLHEMIQQIFNLFSTKDSSAAWDETLLDKFYTELYQQLNDLEACVIQGVGVTETPLMKEDSILAVRKYFQRITLYLKEKKYSPCAWEVVRAEIMRSFSLSTNLQESLRSKE

SEQ ID NO: 137 - protein, 165 aa, Artificial Sequence
  L26N/S28S Mutant IFN-alpha 2b
CDLPQTHSLGSRRTLMLLAQMRRISNFSCLKDRHDFGFPQEEFGNQFQKAETIPVLHEMIQQIFNLFSTKDSSAAWDETLLDKFYTELYQQLNDLEACVIQGVGVTETPLMKEDSILAVRKYFQRITLYLKEKKYSPCAWEVVRAEIMRSFSLSTNLQESLRSKE

SEQ ID NO: 138 - protein, 165 aa, Artificial Sequence
  L26N/S28T Mutant IFN-alpha 2b
CDLPQTHSLGSRRTLMLLAQMRRISNFTCLKDRHDFGFPQEEFGNQFQKAETIPVLHEMIQQIFNLFSTKDSSAAWDETLLDKFYTELYQQLNDLEACVIQGVGVTETPLMKEDSILAVRKYFQRITLYLKEKKYSPCAWEVVRAEIMRSFSLSTNLQESLRSKE

SEQ ID NO: 139 - protein, 165 aa, Artificial Sequence
  L30N/D32S Mutant IFN-alpha 2b
CDLPQTHSLGSRRTLMLLAQMRRISLFSCNKSRHDFGFPQEEFGNQFQKAETIPVLHEMIQQIFNLFSTKDSSAAWDETLLDKFYTELYQQLNDLEACVIQGVGVTETPLMKEDSILAVRKYFQRITLYLKEKKYSPCAWEVVRAEIMRSFSLSTNLQESLRSKE

SEQ ID NO: 140 - protein, 165 aa, Artificial Sequence
  R33N/D35S Mutant IFN-alpha 2b
CDLPQTHSLGSRRTLMLLAQMRRISLFSCLKDNHSFGFPQEEFGNQFQKAETIPVLHEMIQQIFNLFSTKDSSAAWDETLLDKFYTELYQQLNDLEACVIQGVGVTETPLMKEDSILAVRKYFQRITLYLKEKKYSPCAWEVVRAEIMRSFSLSTNLQESLRSKE

SEQ ID NO: 141 - protein, 165 aa, Artificial Sequence
  R33N/D35T Mutant IFN-alpha 2b
CDLPQTHSLGSRRTLMLLAQMRRISLFSCLKDNHTFGFPQEEFGNQFQKAETIPVLHEMIQQIFNLFSTKDSSAAWDETLLDKFYTELYQQLNDLEACVIQGVGVTETPLMKEDSILAVRKYFQRITLYLKEKKYSPCAWEVVRAEIMRSFSLSTNLQESLRSKE

SEQ ID NO: 142 - protein, 165 aa, Artificial Sequence
  H34N/F36S Mutant IFN-alpha 2b
CDLPQTHSLGSRRTLMLLAQMRRISLFSCLKDRNDSGFPQEEFGNQFQKAETIPVLHEMIQQIFNLFSTKDSSAAWDETLLDKFYTELYQQLNDLEACVIQGVGVTETPLMKEDSILAVRKYFQRITLYLKEKKYSPCAWEVVRAEIMRSFSLSTNLQESLRSKE

SEQ ID NO: 143 - protein, 165 aa, Artificial Sequence
  H34N/F36T Mutant IFN-alpha 2b
CDLPQTHSLGSRRTLMLLAQMRRISLFSCLKDRNDTGFPQEEFGNQFQKAETIPVLHEMIQQIFNLFSTKDSSAAWDETLLDKFYTELYQQLNDLEACVIQGVGVTETPLMKEDSILAVRKYFQRITLYLKEKKYSPCAWEVVRAEIMRSFSLSTNLQESLRSKE

SEQ ID NO: 144 - protein, 165 aa, Artificial Sequence
  D35N/G37S Mutant IFN-alpha 2b
CDLPQTHSLGSRRTLMLLAQMRRISLFSCLKDRHNFSFPQEEFGNQFQKAETIPVLHEMIQQIFNLFSTKDSSAAWDETLLDKFYTELYQQLNDLEACVIQGVGVTETPLMKEDSILAVRKYFQRITLYLKEKKYSPCAWEVVRAEIMRSFSLSTNLQESLRSKE

SEQ ID NO: 145 - protein, 165 aa, Artificial Sequence
  F36N/F38S Mutant IFN-alpha 2b
CDLPQTHSLGSRRTLMLLAQMRRISLFSCLKDRHDNGSPQEEFGNQFQKAETIPVLHEMIQQIFNLFSTKDSSAAWDETLLDKFYTELYQQLNDLEACVIQGVGVTETPLMKEDSILAVRKYFQRITLYLKEKKYSPCAWEVVRAEIMRSFSLSTNLQESLRSKE

SEQ ID NO: 146 - protein, 165 aa, Artificial Sequence
  F36N/F38T Mutant IFN-alpha 2b
CDLPQTHSLGSRRTLMLLAQMRRISLFSCLKDRHDNGTPQEEFGNQFQKAETIPVLHEMIQQIFNLFSTKDSSAAWDETLLDKFYTELYQQLNDLEACVIQGVGVTETPLMKEDSILAVRKYFQRITLYLKEKKYSPCAWEVVRAEIMRSFSLSTNLQESLRSKE

SEQ ID NO: 147 - protein, 165 aa, Artificial Sequence
  G37N/P39T Mutant IFN-alpha 2b
CDLPQTHSLGSRRTLMLLAQMRRISLFSCLKDRHDFNFTQEEFGNQFQKAETIPVLHEMIQQIFNLFSTKDSSAAWDETLLDKFYTELYQQLNDLEACVIQGVGVTETPLMKEDSILAVRKYFQRITLYLKEKKYSPCAWEVVRAEIMRSFSLSTNLQESLRSKE

SEQ ID NO: 148 - protein, 165 aa, Artificial Sequence
  F38N/Q40S Mutant IFN-alpha 2b
CDLPQTHSLGSRRTLMLLAQMRRISLFSCLKDRHDFGNPSEEFGNQFQKAETIPVLHEMIQQIFNLFSTKDSSAAWDETLLDKFYTELYQQLNDLEACVIQGVGVTETPLMKEDSILAVRKYFQRITLYLKEKKYSPCAWEVVRAEIMRSFSLSTNLQESLRSKE

SEQ ID NO: 149 - protein, 165 aa, Artificial Sequence
  F38N/Q40T Mutant IFN-alpha 2b
CDLPQTHSLGSRRTLMLLAQMRRISLFSCLKDRHDFGNPTEEFGNQFQKAETIPVLHEMIQQIFNLFSTKDSSAAWDETLLDKFYTELYQQLNDLEACVIQGVGVTETPLMKEDSILAVRKYFQRITLYLKEKKYSPCAWEVVRAEIMRSFSLSTNLQESLRSKE

SEQ ID NO: 150 - protein, 165 aa, Artificial Sequence
  P39N/E41S Mutant IFN-alpha 2b
CDLPQTHSLGSRRTLMLLAQMRRISLFSCLKDRHDFGFNQSEFGNQFQKAETIPVLHEMIQQIFNLFSTKDSSAAWDETLLDKFYTELYQQLNDLEACVIQGVGVTETPLMKEDSILAVRKYFQRITLYLKEKKYSPCAWEVVRAEIMRSFSLSTNLQESLRSKE

SEQ ID NO: 151 - protein, 165 aa, Artificial Sequence
  P39N/E41T Mutant IFN-alpha 2b
CDLPQTHSLGSRRTLMLLAQMRRISLFSCLKDRHDFGFNQTEFGNQFQKAETIPVLHEMIQQIFNLFSTKDSSAAWDETLLDKFYTELYQQLNDLEACVIQGVGVTETPLMKEDSILAVRKYFQRITLYLKEKKYSPCAWEVVRAEIMRSFSLSTNLQESLRSKE

SEQ ID NO: 152 - protein, 165 aa, Artificial Sequence
  Q40N/E42S Mutant IFN-alpha 2b
CDLPQTHSLGSRRTLMLLAQMRRISLFSCLKDRHDFGFPNESFGNQFQKAETIPVLHEMIQQIFNLFSTKDSSAAWDETLLDKFYTELYQQLNDLEACVIQGVGVTETPLMKEDSILAVRKYFQRITLYLKEKKYSPCAWEVVRAEIMRSFSLSTNLQESLRSKE

SEQ ID NO: 153 - protein, 165 aa, Artificial Sequence
  Q40N/E42T Mutant IFN-alpha 2b
CDLPQTHSLGSRRTLMLLAQMRRISLFSCLKDRHDFGFPNETFGNQFQKAETIPVLHEMIQQIFNLFSTKDSSAAWDETLLDKFYTELYQQLNDLEACVIQGVGVTETPLMKEDSILAVRKYFQRITLYLKEKKYSPCAWEVVRAEIMRSFSLSTNLQESLRSKE

SEQ ID NO: 154 - protein, 165 aa, Artificial Sequence
  E41N/F43S Mutant IFN-alpha 2b
CDLPQTHSLGSRRTLMLLAQMRRISLFSCLKDRHDFGFPQNESGNQFQKAETIPVLHEMIQQIFNLFSTKDSSAAWDETLLDKFYTELYQQLNDLEACVIQGVGVTETPLMKEDSILAVRKYFQRITLYLKEKKYSPCAWEVVRAEIMRSFSLSTNLQESLRSKE

SEQ ID NO: 155 - protein, 165 aa, Artificial Sequence
  E41N/F43T Mutant IFN-alpha 2b
CDLPQTHSLGSRRTLMLLAQMRRISLFSCLKDRHDFGFPQNETGNQFQKAETIPVLHEMIQQIFNLFSTKDSSAAWDETLLDKFYTELYQQLNDLEACVIQGVGVTETPLMKEDSILAVRKYFQRITLYLKEKKYSPCAWEVVRAEIMRSFSLSTNLQESLRSKE

SEQ ID NO: 156 - protein, 165 aa, Artificial Sequence
  G44N/Q46S Mutant IFN-alpha 2b
CDLPQTHSLGSRRTLMLLAQMRRISLFSCLKDRHDFGFPQEEFNNSFQKAETIPVLHEMIQQIFNLFSTKDSSAAWDETLLDKFYTELYQQLNDLEACVIQGVGVTETPLMKEDSILAVRKYFQRITLYLKEKKYSPCAWEVVRAEIMRSFSLSTNLQESLRSKE

SEQ ID NO: 157 - protein, 165 aa, Artificial Sequence
  G44N/Q46T Mutant IFN-alpha 2b
CDLPQTHSLGSRRTLMLLAQMRRISLFSCLKDRHDFGFPQEEFNNTFQKAETIPVLHEMIQQIFNLFSTKDSSAAWDETLLDKFYTELYQQLNDLEACVIQGVGVTETPLMKEDSILAVRKYFQRITLYLKEKKYSPCAWEVVRAEIMRSFSLSTNLQESLRSKE

SEQ ID NO: 158 - protein, 165 aa, Artificial Sequence
  N45N/F47S Mutant IFN-alpha 2b
CDLPQTHSLGSRRTLMLLAQMRRISLFSCLKDRHDFGFPQEEFGNQSQKAETIPVLHEMIQQIFNLFSTKDSSAAWDETLLDKFYTELYQQLNDLEACVIQGVGVTETPLMKEDSILAVRKYFQRITLYLKEKKYSPCAWEVVRAEIMRSFSLSTNLQESLRSKE

SEQ ID NO: 159 - protein, 165 aa, Artificial Sequence
  N45N/F47T Mutant IFN-alpha 2b
CDLPQTHSLGSRRTLMLLAQMRRISLFSCLKDRHDFGFPQEEFGNQTQKAETIPVLHEMIQQIFNLFSTKDSSAAWDETLLDKFYTELYQQLNDLEACVIQGVGVTETPLMKEDSILAVRKYFQRITLYLKEKKYSPCAWEVVRAEIMRSFSLSTNLQESLRSKE

SEQ ID NO: 160 - protein, 165 aa, Artificial Sequence
  Q46N/Q48S Mutant IFN-alpha 2b
CDLPQTHSLGSRRTLMLLAQMRRISLFSCLKDRHDFGFPQEEFGNNFSKAETIPVLHEMIQQIFNLFSTKDSSAAWDETLLDKFYTELYQQLNDLEACVIQGVGVTETPLMKEDSILAVRKYFQRITLYLKEKKYSPCAWEVVRAEIMRSFSLSTNLQESLRSKE

SEQ ID NO: 161 - protein, 165 aa, Artificial Sequence
  Q46N/Q48T Mutant IFN-alpha 2b
CDLPQTHSLGSRRTLMLLAQMRRISLFSCLKDRHDFGFPQEEFGNNFTKAETIPVLHEMIQQIFNLFSTKDSSAAWDETLLDKFYTELYQQLNDLEACVIQGVGVTETPLMKEDSILAVRKYFQRITLYLKEKKYSPCAWEVVRAEIMRSFSLSTNLQESLRSKE

SEQ ID NO: 162 - protein, 165 aa, Artificial Sequence
  F47N/K49S Mutant IFN-alpha 2b
CDLPQTHSLGSRRTLMLLAQMRRISLFSCLKDRHDFGFPQEEFGNQNQSAETIPVLHEMIQQIFNLFSTKDSSAAWDETLLDKFYTELYQQLNDLEACVIQGVGVTETPLMKEDSILAVRKYFQRITLYLKEKKYSPCAWEVVRAEIMRSFSLSTNLQESLRSKE

SEQ ID NO: 163 - protein, 165 aa, Artificial Sequence
  F47N/K49T Mutant IFN-alpha 2b
CDLPQTHSLGSRRTLMLLAQMRRISLFSCLKDRHDFGFPQEEFGNQNQTAETIPVLHEMIQQIFNLFSTKDSSAAWDETLLDKFYTELYQQLNDLEACVIQGVGVTETPLMKEDSILAVRKYFQRITLYLKEKKYSPCAWEVVRAEIMRSFSLSTNLQESLRSKE

SEQ ID NO: 164 - protein, 165 aa, Artificial Sequence
  K49N/E51S Mutant IFN-alpha 2b
CDLPQTHSLGSRRTLMLLAQMRRISLFSCLKDRHDFGFPQEEFGNQFQNASTIPVLHEMIQQIFNLFSTKDSSAAWDETLLDKFYTELYQQLNDLEACVIQGVGVTETPLMKEDSILAVRKYFQRITLYLKEKKYSPCAWEVVRAEIMRSFSLSTNLQESLRSKE

SEQ ID NO: 165 - protein, 165 aa, Artificial Sequence
  A75N/D77S Mutant IFN-alpha 2b
CDLPQTHSLGSRRTLMLLAQMRRISLFSCLKDRHDFGFPQEEFGNQFQKAETIPVLHEMIQQIFNLFSTKDSSANWSETLLDKFYTELYQQLNDLEACVIQGVGVTETPLMKEDSILAVRKYFQRITLYLKEKKYSPCAWEVVRAEIMRSFSLSTNLQESLRSKE

SEQ ID NO: 166 - protein, 165 aa, Artificial Sequence
  I100N/G102S Mutant IFN-alpha 2b
CDLPQTHSLGSRRTLMLLAQMRRISLFSCLKDRHDFGFPQEEFGNQFQKAETIPVLHEMIQQIFNLFSTKDSSAAWDETLLDKFYTELYQQLNDLEACVNQSVGVTETPLMKEDSILAVRKYFQRITLYLKEKKYSPCAWEVVRAEIMRSFSLSTNLQESLRSKE

SEQ ID NO: 167 - protein, 165 aa, Artificial Sequence
  I100N/G102T Mutant IFN-alpha 2b
CDLPQTHSLGSRRTLMLLAQMRRISLFSCLKDRHDFGFPQEEFGNQFQKAETIPVLHEMIQQIFNLFSTKDSSAAWDETLLDKFYTELYQQLNDLEACVNQTVGVTETPLMKEDSILAVRKYFQRITLYLKEKKYSPCAWEVVRAEIMRSFSLSTNLQESLRSKE

SEQ ID NO: 168 - protein, 165 aa, Artificial Sequence
  V103N/V105S Mutant IFN-alpha 2b
CDLPQTHSLGSRRTLMLLAQMRRISLFSCLKDRHDFGFPQEEFGNQFQKAETIPVLHEMIQQIFNLFSTKDSSAAWDETLLDKFYTELYQQLNDLEACVIQGNGSTETPLMKEDSILAVRKYFQRITLYLKEKKYSPCAWEVVRAEIMRSFSLSTNLQESLRSKE

SEQ ID NO: 169 - protein, 165 aa, Artificial Sequence
  V103N/V105T Mutant IFN-alpha 2b
CDLPQTHSLGSRRTLMLLAQMRRISLFSCLKDRHDFGFPQEEFGNQFQKAETIPVLHEMIQQIFNLFSTKDSSAAWDETLLDKFYTELYQQLNDLEACVIQGNGTTETPLMKEDSILAVRKYFQRITLYLKEKKYSPCAWEVVRAEIMRSFSLSTNLQESLRSKE

SEQ ID NO: 170 - protein, 165 aa, Artificial Sequence
  G104N/T106T Mutant IFN-alpha 2b
CDLPQTHSLGSRRTLMLLAQMRRISLFSCLKDRHDFGFPQEEFGNQFQKAETIPVLHEMIQQIFNLFSTKDSSAAWDETLLDKFYTELYQQLNDLEACVIQGVNVTETPLMKEDSILAVRKYFQRITLYLKEKKYSPCAWEVVRAEIMRSFSLSTNLQESLRSKE

SEQ ID NO: 171 - protein, 165 aa, Artificial Sequence
  V105N/E107S Mutant IFN-alpha 2b
CDLPQTHSLGSRRTLMLLAQMRRISLFSCLKDRHDFGFPQEEFGNQFQKAETIPVLHEMIQQIFNLFSTKDSSAAWDETLLDKFYTELYQQLNDLEACVIQGVGNTSTPLMKEDSILAVRKYFQRITLYLKEKKYSPCAWEVVRAEIMRSFSLSTNLQESLRSKE

SEQ ID NO: 172 - protein, 165 aa, Artificial Sequence
  T106N/T108S Mutant IFN-alpha 2b
CDLPQTHSLGSRRTLMLLAQMRRISLFSCLKDRHDFGFPQEEFGNQFQKAETIPVLHEMIQQIFNLFSTKDSSAAWDETLLDKFYTELYQQLNDLEACVIQGVGVNESPLMKEDSILAVRKYFQRITLYLKEKKYSPCAWEVVRAEIMRSFSLSTNLQESLRSKE

SEQ ID NO: 173 - protein, 165 aa, Artificial Sequence
  T106N/T108T Mutant IFN-alpha 2b
CDLPQTHSLGSRRTLMLLAQMRRISLFSCLKDRHDFGFPQEEFGNQFQKAETIPVLHEMIQQIFNLFSTKDSSAAWDETLLDKFYTELYQQLNDLEACVIQGVGVNETPLMKEDSILAVRKYFQRITLYLKEKKYSPCAWEVVRAEIMRSFSLSTNLQESLRSKE

SEQ ID NO: 174 - protein, 165 aa, Artificial Sequence
  E107N/P109S Mutant IFN-alpha 2b
CDLPQTHSLGSRRTLMLLAQMRRISLFSCLKDRHDFGFPQEEFGNQFQKAETIPVLHEMIQQIFNLFSTKDSSAAWDETLLDKFYTELYQQLNDLEACVIQGVGVTNTSLMKEDSILAVRKYFQRITLYLKEKKYSPCAWEVVRAEIMRSFSLSTNLQESLRSKE

SEQ ID NO: 175 - protein, 165 aa, Artificial Sequence
  E107N/P109T Mutant IFN-alpha 2b
CDLPQTHSLGSRRTLMLLAQMRRISLFSCLKDRHDFGFPQEEFGNQFQKAETIPVLHEMIQQIFNLFSTKDSSAAWDETLLDKFYTELYQQLNDLEACVIQGVGVTNTTLMKEDSILAVRKYFQRITLYLKEKKYSPCAWEVVRAEIMRSFSLSTNLQESLRSKE

SEQ ID NO: 176 - protein, 165 aa, Artificial Sequence
  K134N/S136T Mutant IFN-alpha 2b
CDLPQTHSLGSRRTLMLLAQMRRISLFSCLKDRHDFGFPQEEFGNQFQKAETIPVLHEMIQQIFNLFSTKDSSAAWDETLLDKFYTELYQQLNDLEACVIQGVGVTETPLMKEDSILAVRKYFQRITLYLKEKNYTPCAWEVVRAEIMRSFSLSTNLQESLRSKE

SEQ ID NO: 177 - protein, 165 aa, Artificial Sequence
  L157N/E159S Mutant IFN-alpha 2b
CDLPQTHSLGSRRTLMLLAQMRRISLFSCLKDRHDFGFPQEEFGNQFQKAETIPVLHEMIQQIFNLFSTKDSSAAWDETLLDKFYTELYQQLNDLEACVIQGVGVTETPLMKEDSILAVRKYFQRITLYLKEKKYSPCAWEVVRAEIMRSFSLSTNNQSSLRSKE

SEQ ID NO: 178 - protein, 165 aa, Artificial Sequence
  L157N/E159T Mutant IFN-alpha 2b
CDLPQTHSLGSRRTLMLLAQMRRISLFSCLKDRHDFGFPQEEFGNQFQKAETIPVLHEMIQQIFNLFSTKDSSAAWDETLLDKFYTELYQQLNDLEACVIQGVGVTETPLMKEDSILAVRKYFQRITLYLKEKKYSPCAWEVVRAEIMRSFSLSTNNQTSLRSKE

SEQ ID NO: 179 - protein, 165 aa, Artificial Sequence
  Q158N/S160T Mutant IFN-alpha 2b
CDLPQTHSLGSRRTLMLLAQMRRISLFSCLKDRHDFGFPQEEFGNQFQKAETIPVLHEMIQQIFNLFSTKDSSAAWDETLLDKFYTELYQQLNDLEACVIQGVGVTETPLMKEDSILAVRKYFQRITLYLKEKKYSPCAWEVVRAEIMRSFSLSTNLNETLRSKE

SEQ ID NO: 180 - protein, 165 aa, Artificial Sequence
  E159N/L161S Mutant IFN-alpha 2b
CDLPQTHSLGSRRTLMLLAQMRRISLFSCLKDRHDFGFPQEEFGNQFQKAETIPVLHEMIQQIFNLFSTKDSSAAWDETLLDKFYTELYQQLNDLEACVIQGVGVTETPLMKEDSILAVRKYFQRITLYLKEKKYSPCAWEVVRAEIMRSFSLSTNLQNSSRSKE

SEQ ID NO: 181 - protein, 165 aa, Artificial Sequence
  E159N/L161T Mutant IFN-alpha 2b
CDLPQTHSLGSRRTLMLLAQMRRISLFSCLKDRHDFGFPQEEFGNQFQKAETIPVLHEMIQQIFNLFSTKDSSAAWDETLLDKFYTELYQQLNDLEACVIQGVGVTETPLMKEDSILAVRKYFQRITLYLKEKKYSPCAWEVVRAEIMRSFSLSTNLQNSTRSKE

SEQ ID NO: 182 - protein, 165 aa, Homo sapiens
CDLPQTHSLGSRRTLMLLAQMRKISLFSCLKDRHDFGFPQEEFGNQFQKAETIPVLHEMIQQIFNLFSTKDSSAAWDETLLDKFYTELYQQLNDLEACVIQGVGVTETPLMKEDSILAVRKYFQRITLYLKEKKYSPCAWEVVRAEIMRSFSLSTNLQESLRSKE

SEQ ID NO: 183 - protein, 166 aa, Homo sapiens
CDLPQTHSLGNRRALILLGQMGRISPFSCLKDRHDFRIPQEEFDGNQFQKAQAISVLHEMIQQTFNLFSTEDSSAAWEQSLLEKFSTELYQQLNDLEACVIQEVGVEETPLMNEDSILAVRKYFQRITLYLIERKYSPCAWEVVRAEIMRSLSFSTNLQKRLRRKD

SEQ ID NO: 184 - skipped

SEQ ID NO: 185 - protein, 165 aa, Homo sapiens
CDLPQTHSLGSRRTLMLLAQMRRISLFSCLKDRRDFGFPQEEFGNQFQKAETIPVLHEMIQQIFNLFSTKDSSAAWDETLLDKFYTELYQQLNDLEACVIQGVGVTETPLMKEDSILAVRKYFQRITLYLKEKKYSPCAWEVVRAEIMRSFSLSTNLQESLRSKE

SEQ ID NO: 186 - protein, 166 aa, Homo sapiens
CDLPETHSLDNRRTLMLLAQMSRISPSSCLMDRHDFGFPQEEFDGNQFQKAPAISVLHELIQQIFNLFTTKDSSAAWDEDLLDKFCTELYQQLNDLEACVMQEERVGETPLMNADSILAVKKYFRRITLYLTEKKYSPCAWEVVRAEIMRSLSLSTNLQERLRRKE

SEQ ID NO: 187 - protein, 166 aa, Homo sapiens
CDLPQTHSLSNRRTLMIMAQMGRISPFSCLKDRHDFGFPQEEFDGNQFQKAQAISVLHEMIQQTFNLFSTKDSSATWDETLLDKFYTELYQQLNDLEACMMQEVGVEDTPLMNVDSILTVRKYFQRITLYLTEKKYSPCAWEVVRAEIMRSFSLSANLQERLRRKE

SEQ ID NO: 188 - protein, 166 aa, Homo sapiens
CDLPQTHSLGHRRTMMLLAQMRRISLFSCLKDRHDFRFPQEEFDGNQFQKAEAISVLHEVIQQTFNLFSTKDSSVAWDERLLDKLYTELYQQLNDLEACVMQEVWVGGTPLMNEDSILAVRKYFQRITLYLTEKKYSPCAWEVVRAEIMRSFSSSRNLQERLRRKE

SEQ ID NO: 189 - protein, 166 aa, Homo sapiens
CDLPQTHSLGNRRALILLAQMGRISHFSCLKDRHDFGFPEEEFDGHQFQKAQAISVLHEMIQQTFNLFSTEDSSAAWEQSLLEKFSTELYQQLNDLEACVIQEVGVEETPLMNEDSILAVRKYFQRITLYLTEKKYSPCAWEVVRAEIMRSLSFSTNLQKRLRRKD

SEQ ID NO: 190 - protein, 166 aa, Homo sapiens
CDLPQTHSLGNRRALILLAQMGRISHFSCLKDRHDFGFPEEEFDGHQFQKTQAISVLHEMIQQTFNLFSTEDSSAAWEQSLLEKFSTELYQQLNDLEACVIQEVGVEETPLMNVDSILAVRKYFQRITLYLTEKKYSPCAWEVVRAEIMRSLSFSTNLQKRLRRKD

SEQ ID NO: 191 - protein, 166 aa, Homo sapiens
CDLPQTHSLGNRRALILLAQMGRISPFSCLKDRHDFGLPQEEFDGNQFQKTQAISVLHEMIQQTFNLFSTEDSSAAWEQSLLEKFSTELYQQLNNLEACVIQEVGMEETPLMNEDSILAVRKYFQRITLYLTEKKYSPCAWEVVRAEIMRSLSFSTNLQKILRRKD

SEQ ID NO: 192 - protein, 166 aa, Homo sapiens
CDLPQTHSLRNRRALILLAQMGRISPFSCLKDRHEFRFPEEEFDGHQFQKTQAISVLHEMIQQTFNLFSTEDSSAAWEQSLLEKFSTELYQQLNDLEACVIQEVGVEETPLMNEDFILAVRKYFQRITLYLMEKKYSPCAWEVVRAEIMRSFSFSTNLKKGLRRKD

SEQ ID NO: 193 - protein, 166 aa, Homo sapiens
CNLSQTHSLNNRRTLMLMAQMRRISPFSCLKDRHDFEFPQEEFDGNQFQKAQAISVLHEMMQQTFNLFSTKNSSAAWDETLLEKFYIELFQQMNDLEACVIQEVGVEETPLMNEDSILAVKKYFQRITLYLMEKKYSPCAWEVVRAEIMRSLSFSTNLQKRLRRKD

SEQ ID NO: 194 - protein, 166 aa, Homo sapiens
CDLPQTHSLGNRRALILLAQMGRISPFSCLKDRHDFGFPQEEFDGNQFQKAQAISVLHEMIQQTFNLFSTKDSSATWEQSLLEKFSTELNQQLNDLEACVIQEVGVEETPLMNVDSILAVKKYFQRITLYLTEKKYSPCAWEVVRAEIMRSFSLSKIFQERLRRKE

SEQ ID NO: 195 - protein, 166 aa, Homo sapiens
CDLPQTHSLGNRRALILLAQMRRISPFSCLKDRHDFEFPQEEFDDKQFQKAQAISVLHEMIQQTFNLFSTKDSSAALDETLLDEFYIELDQQLNDLESCVMQEVGVIESPLMYEDSILAVRKYFQRITLYLTEKKYSSCAWEVVRAEIMRSFSLSINLQKRLKSKE

SEQ ID NO: 196 - protein, 166 aa, Homo sapiens
MSYNLLGFLQRSSNFQCQKLLWQLNGRLEYCLKDRMNFDIPEEIKQLQQFQKEDAALTIYEMLQNIFAIFRQDSSSTGWNETIVENLLANVYHQINHLKTVLEEKLEKEDFTRGKLMSSLHLKRYYGRILHYLKAKEYSHCAWTIVRVEILRNFYFINRLTGYLRN

SEQ ID NO: 197 - protein, 166 aa, Homo sapiens; identical to SEQ ID NO: 196

SEQ ID NO: 198 - protein, 183 aa, Homo sapiens
VPPGEDSKDVAAPHRQPLTSSERIDKQIRYILDGISALRKETCNKSNMCESSKEALAENNLNLPKMAEKDGCFQSGFNEETCLVKIITGLLEFEVYLEYLQNRFESSEEQARAVQMSTKVLIQFLQKKAKNLDAITTPDPTTNASLLTKLQAQNQWLQDMTTHLILRSFKEFLQSSLRALRQM

SEQ ID NO: 199 - protein, 146 aa, Homo sapiens
CYCQDPYVKEAENLKKYFNAGHSDVADNGTLFLGILKNWKEESDRKIMQSQIVSFYFKLFKNFKDDQSIQKSVETIKEDMNVKFFNSNKKKRDDFEKLTNYSVTDLNVQRKAIHELIQVMAELSPAAKTGKRKRSQMLFQGRRASQ

SEQ ID NO: 200 - skipped

SEQ ID NO: 201 - protein, 166 aa, Homo sapiens
APPRLICDSRVLERYLLEAKEAENITTGCAEHCSLNENITVPDTKVNFYAWKRMEVGQQAVEVWQGLALLSEAVLRGQALLVNSSQPWEPLQLHVDKAVSGLRSLTTLLRALGAQKEAISPPDAASAAPLRTITADTFRKLFRVYSNFLRGKLKLYTGEACRTGDR

SEQ ID NO: 202 - protein, 127 aa, Homo sapiens [sequence omitted]

SEQ ID NO: 203-209 - skipped (7 entries)

SEQ ID NO: 210 - protein, 177 aa, Homo sapiens
TPLGPASSLPQSFLLKCLEQVRKIQGDGAALQEKLVSECATYKLCHPEELVLLGHSLGIPWAPLSSCPSQALQLAGCLSQLHSGLFLYQGLLQALEGISPELGPTLDTLQLDVADFATTIWQQMEELGMAPALQPTQGAMPAFASAFQRRAGGVLVASHLQSFLEVSYRVLRHLAQP

SEQ ID NO: 211-231 - skipped (21 entries)

SEQ ID NO: 232 - protein, 165 aa, Artificial Sequence
  Interferon alpha consensus sequence
CDLPQTHSLGNRRALILLAQMRRISPFSCLKDRHDFGPQEEFDGNQFQKAQAISVLHEMIQQTFNLFSTKDSSAAWDESLLEKFYTELYQQLNDLEACVIQEVGVEETPLMNVDSILAVKKYFQRITLYLTEKKYSPCAWEVVRAEIMRSFSLSTNLQERLRRKE

SEQ ID NO: 233 - protein, 166 aa, Homo sapiens
MSYNLLGFLQRSSNFQCQKLLWQLNGRLEYCLKDRMNFQIPEEIKQLQQFQKEDAALTIYEMLQNIFAIFRQDSSSTGWNETIVENLLANVYHQINHLKTVLEEKLEKEDFTRGKLMSSLHLKRYYGRILHYLKAKEYSHCAWTIVRVEILRNFYFINRLTGYLRN

SEQ ID NO: 234 - protein, 166 aa, Homo sapiens; identical to SEQ ID NO: 233

SEQ ID NO: 235 - protein, 166 aa, Homo sapiens
MSYNLLGFLQRSSNFQCQKLLWQLNGRLEYCLKDRMNFHIPEEIKQLQQFQKEDAALTIYEMLQNIFAIFRQDSSSTGWNETIVENLLANVYHQINHLKTVLEEKLEKEDFTRGKLMSSLHLKRYYGRILHYLKAKEYSHCAWTIVRVEILRNFYFINRLTGYLRN

SEQ ID NO: 236 - protein, 166 aa, Homo sapiens
MSYNLLGFLQRSSNFQCQKLLWQLNGRLEYCLKDRMNFGIPEEIKQLQQFQKEDAALTIYEMLQNIFAIFRQDSSSTGWNETIVENLLANVYHQINHLKTVLEEKLEKEDFTRGKLMSSLHLKRYYGRILHYLKAKEYSHCAWTIVRVEILRNFYFINRLTGYLRN

SEQ ID NO: 237 - protein, 166 aa, Homo sapiens
MSYNLLGFLQRSSNFQCQKLLWQLNGRLEYCLKDRMNFDIPQEIKQLQQFQKEDAALTIYEMLQNIFAIFRQDSSSTGWNETIVENLLANVYHQINHLKTVLEEKLEKEDFTRGKLMSSLHLKRYYGRILHYLKAKEYSHCAWTIVRVEILRNFYFINRLTGYLRN

SEQ ID NO: 238 - protein, 166 aa, Homo sapiens
MSYNLLGFLQRSSNFQCQKLLWQLNGRLEYCLKDRMNFDIPHEIKQLQQFQKEDAALTIYEMLQNIFAIFRQDSSSTGWNETIVENLLANVYHQINHLKTVLEEKLEKEDFTRGKLMSSLHLKRYYGRILHYLKAKEYSHCAWTIVRVEILRNFYFINRLTGYLRN

SEQ ID NO: 239 - protein, 166 aa, Homo sapiens
MSYNLLGFLQRSSNFQCQKLLWQLNGRLEYCLKDRMNFDIPEEIQQLQQFQKEDAALTIYEMLQNIFAIFRQDSSSTGWNETIVENLLANVYHQINHLKTVLEEKLEKEDFTRGKLMSSLHLKRYYGRILHYLKAKEYSHCAWTIVRVEILRNFYFINRLTGYLRN

SEQ ID NO: 240 - protein, 166 aa, Homo sapiens
MSYNLLGFLQRSSNFQCQKLLWQLNGRLEYCLKDRMNFDIPEEITQLQQFQKEDAALTIYEMLQNIFAIFRQDSSSTGWNETIVENLLANVYHQINHLKTVLEEKLEKEDFTRGKLMSSLHLKRYYGRILHYLKAKEYSHCAWTIVRVEILRNFYFINRLTGYLRN

SEQ ID NO: 241 - protein, 166 aa, Homo sapiens
MSYNLLGFLQRSSNFQCQKLLWQLNGRLEYCLKDRMNFDIPEEISQLQQFQKEDAALTIYEMLQNIFAIFRQDSSSTGWNETIVENLLANVYHQINHLKTVLEEKLEKEDFTRGKLMSSLHLKRYYGRILHYLKAKEYSHCAWTIVRVEILRNFYFINRLTGYLRN

SEQ ID NO: 242 - protein, 166 aa, Homo sapiens
MSYNLLGFLQRSSNFQCQKLLWQLNGRLEYCLKDRMNFDIPEEIHQLQQFQKEDAALTIYEMLQNIFAIFRQDSSSTGWNETIVENLLANVYHQINHLKTVLEEKLEKEDFTRGKLMSSLHLKRYYGRILHYLKAKEYSHCAWTIVRVEILRNFYFINRLTGYLRN

SEQ ID NO: 243 - protein, 166 aa, Homo sapiens
MSYNLLGFLQRSSNFQCQKLLWQLNGRLEYCLKDRMNFDIPEEIKQVQQFQKEDAALTIYEMLQNIFAIFRQDSSSTGWNETIVENLLANVYHQINHLKTVLEEKLEKEDFTRGKLMSSLHLKRYYGRILHYLKAKEYSHCAWTIVRVEILRNFYFINRLTGYLRN

SEQ ID NO: 244 - protein, 166 aa, Homo sapiens
MSYNLLGFLQRSSNFQCQKLLWQLNGRLEYCLKDRMNFDIPEEIKQIQQFQKEDAALTIYEMLQNIFAIFRQDSSSTGWNETIVENLLANVYHQINHLKTVLEEKLEKEDFTRGKLMSSLHLKRYYGRILHYLKAKEYSHCAWTIVRVEILRNFYFINRLTGYLRN

SEQ ID NO: 245 - protein, 166 aa, Homo sapiens
MSYNLLGFLQRSSNFQCQKLLWQLNGRLEYCLKDRMNFDIPEEIKQTQQFQKEDAALTIYEMLQNIFAIFRQDSSSTGWNETIVENLLANVYHQINHLKTVLEEKLEKEDFTRGKLMSSLHLKRYYGRILHYLKAKEYSHCAWTIVRVEILRNFYFINRLTGYLRN

SEQ ID NO: 246 - protein, 166 aa, Homo sapiens
MSYNLLGFLQRSSNFQCQKLLWQLNGRLEYCLKDRMNFDIPEEIKQQQQFQKEDAALTIYEMLQNIFAIFRQDSSSTGWNETIVENLLANVYHQINHLKTVLEEKLEKEDFTRGKLMSSLHLKRYYGRILHYLKAKEYSHCAWTIVRVEILRNFYFINRLTGYLRN

SEQ ID NO: 247 - protein, 166 aa, Homo sapiens
MSYNLLGFLQRSSNFQCQKLLWQLNGRLEYCLKDRMNFDIPEEIKQHQQFQKEDAALTIYEMLQNIFAIFRQDSSSTGWNETIVENLLANVYHQINHLKTVLEEKLEKEDFTRGKLMSSLHLKRYYGRILHYLKAKEYSHCAWTIVRVEILRNFYFINRLTGYLRN

SEQ ID NO: 248 - protein, 166 aa, Homo sapiens
MSYNLLGFLQRSSNFQCQKLLWQLNGRLEYCLKDRMNFDIPEEIKQAQQFQKEDAALTIYEMLQNIFAIFRQDSSSTGWNETIVENLLANVYHQINHLKTVLEEKLEKEDFTRGKLMSSLHLKRYYGRILHYLKAKEYSHCAWTIVRVEILRNFYFINRLTGYLRN

SEQ ID NO: 249 - protein, 166 aa, Homo sapiens
MSYNLLGFLQRSSNFQCQKLLWQLNGRLEYCLKDRMNFDIPEEIKQLQQFQQEDAALTIYEMLQNIFAIFRQDSSSTGWNETIVENLLANVYHQINHLKTVLEEKLEKEDFTRGKLMSSLHLKRYYGRILHYLKAKEYSHCAWTIVRVEILRNFYFINRLTGYLRN

SEQ ID NO: 250 - protein, 166 aa, Homo sapiens
MSYNLLGFLQRSSNFQCQKLLWQLNGRLEYCLKDRMNFDIPEEIKQLQQFQTEDAALTIYEMLQNIFAIFRQDSSSTGWNETIVENLLANVYHQINHLKTVLEEKLEKEDFTRGKLMSSLHLKRYYGRILHYLKAKEYSHCAWTIVRVEILRNFYFINRLTGYLRN

SEQ ID NO: 251 - protein, 166 aa, Homo sapiens
MSYNLLGFLQRSSNFQCQKLLWQLNGRLEYCLKDRMNFDIPEEIKQLQQFQSEDAALTIYEMLQNIFAIFRQDSSSTGWNETIVENLLANVYHQINHLKTVLEEKLEKEDFTRGKLMSSLHLKRYYGRILHYLKAKEYSHCAWTIVRVEILRNFYFINRLTGYLRN

SEQ ID NO: 252 - protein, 166 aa, Homo sapiens
MSYNLLGFLQRSSNFQCQKLLWQLNGRLEYCLKDRMNFDIPEEIKQLQQFQHEDAALTIYEMLQNIFAIFRQDSSSTGWNETIVENLLANVYHQINHLKTVLEEKLEKEDFTRGKLMSSLHLKRYYGRILHYLKAKEYSHCAWTIVRVEILRNFYFINRLTGYLRN

SEQ ID NO: 253 - protein, 166 aa, Homo sapiens
MSYNLLGFLQRSSNFQCQKLLWQLNGRLEYCLKDRMNFDIPEEIKQLQQFQKEDAALTIYEMLQNIIAIFRQDSSSTGWNETIVENLLANVYHQINHLKTVLEEKLEKEDFTRGKLMSSLHLKRYYGRILHYLKAKEYSHCAWTIVRVEILRNFYFINRLTGYLRN

SEQ ID NO: 254 - protein, 166 aa, Homo sapiens
MSYNLLGFLQRSSNFQCQKLLWQLNGRLEYCLKDRMNFDIPEEIKQLQQFQKEDAALTIYEMLQNIVAIFRQDSSSTGWNETIVENLLANVYHQINHLKTVLEEKLEKEDFTRGKLMSSLHLKRYYGRILHYLKAKEYSHCAWTIVRVEILRNFYFINRLTGYLRN

SEQ ID NO: 255 - protein, 166 aa, Homo sapiens
MSYNLLGFLQRSSNFQCQKLLWQLNGRLEYCLKDRMNFDIPEEIKQLQQFQKEDAALTIYEMLQNIFAIFHQDSSSTGWNETIVENLLANVYHQINHLKTVLEEKLEKEDFTRGKLMSSLHLKRYYGRILHYLKAKEYSHCAWTIVRVEILRNFYFINRLTGYLRN

SEQ ID NO: 256 - protein, 166 aa, Homo sapiens
MSYNLLGFLQRSSNFQCQKLLWQLNGRLEYCLKDRMNFDIPEEIKQLQQFQKEDAALTIYEMLQNIFAIFQQDSSSTGWNETIVENLLANVYHQINHLKTVLEEKLEKEDFTRGKLMSSLHLKRYYGRILHYLKAKEYSHCAWTIVRVEILRNFYFINRLTGYLRN

SEQ ID NO: 257 - protein, 166 aa, Homo sapiens
MSYNLLGFLQRSSNFQCQKLLWQLNGRLEYCLKDRMNFDIPEEIKQLQQFQKEDAALTIYEMLQNIFAIFRQQSSSTGWNETIVENLLANVYHQINHLKTVLEEKLEKEDFTRGKLMSSLHLKRYYGRILHYLKAKEYSHCAWTIVRVEILRNFYFINRLTGYLRN

SEQ ID NO: 258 - protein, 166 aa, Homo sapiens
MSYNLLGFLQRSSNFQCQKLLWQLNGRLEYCLKDRMNFDIPEEIKQLQQFQKEDAALTIYEMLQNIFAIFRQHSSSTGWNETIVENLLANVYHQINHLKTVLEEKLEKEDFTRGKLMSSLHLKRYYGRILHYLKAKEYSHCAWTIVRVEILRNFYFINRLTGYLRN

SEQ ID NO: 259 - protein, 166 aa, Homo sapiens
MSYNLLGFLQRSSNFQCQKLLWQLNGRLEYCLKDRMNFDIPEEIKQLQQFQKEDAALTIYEMLQNIFAIFRQGSSSTGWNETIVENLLANVYHQINHLKTVLEEKLEKEDFTRGKLMSSLHLKRYYGRILHYLKAKEYSHCAWTIVRVEILRNFYFINRLTGYLRN

SEQ ID NO: 260 - protein, 166 aa, Homo sapiens
MSYNLLGFLQRSSNFQCQKLLWQLNGRLEYCLKDRMNFDIPEEIKQLQQFQKEDAALTIYEMLQNIFAIFRQDSSSTGWNQTIVENLLANVYHQINHLKTVLEEKLEKEDFTRGKLMSSLHLKRYYGRILHYLKAKEYSHCAWTIVRVEILRNFYFINRLTGYLRN

SEQ ID NO: 261 - protein, 166 aa, Homo sapiens
MSYNLLGFLQRSSNFQCQKLLWQLNGRLEYCLKDRMNFDIPEEIKQLQQFQKEDAALTIYEMLQNIFAIFRQDSSSTGWNHTIVENLLANVYHQINHLKTVLEEKLEKEDFTRGKLMSSLHLKRYYGRILHYLKAKEYSHCAWTIVRVEILRNFYFINRLTGYLRN

SEQ ID NO: 262 - protein, 166 aa, Homo sapiens
MSYNLLGFLQRSSNFQCQKLLWQLNGRLEYCLKDRMNFDIPEEIKQLQQFQKEDAALTIYEMLQNIFAIFRQDSSSTGWNETIVENLLANVYHQINHLKTVLEEKLQKEDFTRGKLMSSLHLKRYYGRILHYLKAKEYSHCAWTIVRVEILRNFYFINRLTGYLRN

SEQ ID NO: 263 - protein, 166 aa, Homo sapiens
MSYNLLGFLQRSSNFQCQKLLWQLNGRLEYCLKDRMNFDIPEEIKQLQQFQKEDAALTIYEMLQNIFAIFRQDSSSTGWNETIVENLLANVYHQINHLKTVLEEKLHKEDFTRGKLMSSLHLKRYYGRILHYLKAKEYSHCAWTIVRVEILRNFYFINRLTGYLRN

SEQ ID NO: 264 - protein, 166 aa, Homo sapiens
MSYNLLGFLQRSSNFQCQKLLWQLNGRLEYCLKDRMNFDIPEEIKQLQQFQKEDAALTIYEMLQNIFAIFRQDSSSTGWNETIVENLLANVYHQINHLKTVLEEKLEQEDFTRGKLMSSLHLKRYYGRILHYLKAKEYSHCAWTIVRVEILRNFYFINRLTGYLRN

SEQ ID NO: 265 - protein, 166 aa, Homo sapiens
MSYNLLGFLQRSSNFQCQKLLWQLNGRLEYCLKDRMNFDIPEEIKQLQQFQKEDAALTIYEMLQNIFAIFRQDSSSTGWNETIVENLLANVYHQINHLKTVLEEKLETEDFTRGKLMSSLHLKRYYGRILHYLKAKEYSHCAWTIVRVEILRNFYFINRLTGYLRN

SEQ ID NO: 266 - protein, 166 aa, Homo sapiens
MSYNLLGFLQRSSNFQCQKLLWQLNGRLEYCLKDRMNFDIPEEIKQLQQFQKEDAALTIYEMLQNIFAIFRQDSSSTGWNETIVENLLANVYHQINHLKTVLEEKLESEDFTRGKLMSSLHLKRYYGRILHYLKAKEYSHCAWTIVRVEILRNFYFINRLTGYLRN

SEQ ID NO: 267 - protein, 166 aa, Homo sapiens
MSYNLLGFLQRSSNFQCQKLLWQLNGRLEYCLKDRMNFDIPEEIKQLQQFQKEDAALTIYEMLQNIFAIFRQDSSSTGWNETIVENLLANVYHQINHLKTVLEEKLEHEDFTRGKLMSSLHLKRYYGRILHYLKAKEYSHCAWTIVRVEILRNFYFINRLTGYLRN

SEQ ID NO: 268 - protein, 166 aa, Homo sapiens
MSYNLLGFLQRSSNFQCQKLLWQLNGRLEYCLKDRMNFDIPEEIKQLQQFQKEDAALTIYEMLQNIFAIFRQDSSSTGWNETIVENLLANVYHQINHLKTVLEEKLEKQDFTRGKLMSSLHLKRYYGRILHYLKAKEYSHCAWTIVRVEILRNFYFINRLTGYLRN

SEQ ID NO: 269 - protein, 166 aa, Homo sapiens
MSYNLLGFLQRSSNFQCQKLLWQLNGRLEYCLKDRMNFDIPEEIKQLQQFQKEDAALTIYEMLQNIFAIFRQDSSSTGWNETIVENLLANVYHQINHLKTVLEEKLEKHDFTRGKLMSSLHLKRYYGRILHYLKAKEYSHCAWTIVRVEILRNFYFINRLTGYLRN

SEQ ID NO: 270 - protein, 166 aa, Homo sapiens
MSYNLLGFLQRSSNFQCQKLLWQLNGRLEYCLKDRMNFDIPEEIKQLQQFQKEDAALTIYEMLQNIFAIFRQDSSSTGWNETIVENLLANVYHQINHLKTVLEEKLEKEQFTRGKLMSSLHLKRYYGRILHYLKAKEYSHCAWTIVRVEILRNFYFINRLTGYLRN

SEQ ID NO: 271 - protein, 166 aa, Homo sapiens
MSYNLLGFLQRSSNFQCQKLLWQLNGRLEYCLKDRMNFDIPEEIKQLQQFQKEDAALTIYEMLQNIFAIFRQDSSSTGWNETIVENLLANVYHQINHLKTVLEEKLEKEHFTRGKLMSSLHLKRYYGRILHYLKAKEYSHCAWTIVRVEILRNFYFINRLTGYLRN

SEQ ID NO: 272 - protein, 166 aa, Homo sapiens
MSYNLLGFLQRSSNFQCQKLLWQLNGRLEYCLKDRMNFDIPEEIKQLQQFQKEDAALTIYEMLQNIFAIFRQDSSSTGWNETIVENLLANVYHQINHLKTVLEEKLEKEGFTRGKLMSSLHLKRYYGRILHYLKAKEYSHCAWTIVRVEILRNFYFINRLTGYLRN

SEQ ID NO: 273 - protein, 166 aa, Homo sapiens
MSYNLLGFLQRSSNFQCQKLLWQLNGRLEYCLKDRMNFDIPEEIKQLQQFQKEDAALTIYEMLQNIFAIFRQDSSSTGWNETIVENLLANVYHQINHLKTVLEEKLEKEDITRGKLMSSLHLKRYYGRILHYLKAKEYSHCAWTIVRVEILRNFYFINRLTGYLRN

SEQ ID NO: 274 - protein, 166 aa, Homo sapiens
MSYNLLGFLQRSSNFQCQKLLWQLNGRLEYCLKDRMNFDIPEEIKQLQQFQKEDAALTIYEMLQNIFAIFRQDSSSTGWNETIVENLLANVYHQINHLKTVLEEKLEKEDVTRGKLMSSLHLKRYYGRILHYLKAKEYSHCAWTIVRVEILRNFYFINRLTGYLRN

SEQ ID NO: 275 - protein, 166 aa, Homo sapiens
MSYNLLGFLQRSSNFQCQKLLWQLNGRLEYCLKDRMNFDIPEEIKQLQQFQKEDAALTIYEMLQNIFAIFRQDSSSTGWNETIVENLLANVYHQINHLKTVLEEKLEKEDFTHGKLMSSLHLKRYYGRILHYLKAKEYSHCAWTIVRVEILRNFYFINRLTGYLRN

SEQ ID NO: 276 - protein, 166 aa, Homo sapiens
MSYNLLGFLQRSSNFQCQKLLWQLNGRLEYCLKDRMNFDIPEEIKQLQQFQKEDAALTIYEMLQNIFAIFRQDSSSTGWNETIVENLLANVYHQINHLKTVLEEKLEKEDFTQGKLMSSLHLKRYYGRILHYLKAKEYSHCAWTIVRVEILRNFYFINRLTGYLRN

SEQ ID NO: 277 - protein, 166 aa, Homo sapiens
MSYNLLGFLQRSSNFQCQKLLWQLNGRLEYCLKDRMNFDIPEEIKQLQQFQKEDAALTIYEMLQNIFAIFRQDSSSTGWNETIVENLLANVYHQINHLKTVLEEKLEKEDFTRGKVMSSLHLKRYYGRILHYLKAKEYSHCAWTIVRVEILRNFYFINRLTGYLRN

SEQ ID NO: 278 - protein, 166 aa, Homo sapiens
MSYNLLGFLQRSSNFQCQKLLWQLNGRLEYCLKDRMNFDIPEEIKQLQQFQKEDAALTIYEMLQNIFAIFRQDSSSTGWNETIVENLLANVYHQINHLKTVLEEKLEKEDFTRGKIMSSLHLKRYYGRILHYLKAKEYSHCAWTIVRVEILRNFYFINRLTGYLRN

SEQ ID NO: 279 - protein, 166 aa, Homo sapiens
MSYNLLGFLQRSSNFQCQKLLWQLNGRLEYCLKDRMNFDIPEEIKQLQQFQKEDAALTIYEMLQNIFAIFRQDSSSTGWNETIVENLLANVYHQINHLKTVLEEKLEKEDFTRGKTMSSLHLKRYYGRILHYLKAKEYSHCAWTIVRVEILRNFYFINRLTGYLRN

SEQ ID NO: 280 - protein, 166 aa, Homo sapiens
MSYNLLGFLQRSSNFQCQKLLWQLNGRLEYCLKDRMNFDIPEEIKQLQQFQKEDAALTIYEMLQNIFAIFRQDSSSTGWNETIVENLLANVYHQINHLKTVLEEKLEKEDFTRGKQMSSLHLKRYYGRILHYLKAKEYSHCAWTIVRVEILRNFYFINRLTGYLRN

SEQ ID NO: 281 - protein, 166 aa, Homo sapiens
MSYNLLGFLQRSSNFQCQKLLWQLNGRLEYCLKDRMNFDIPEEIKQLQQFQKEDAALTIYEMLQNIFAIFRQDSSSTGWNETIVENLLANVYHQINHLKTVLEEKLEKEDFTRGKHMSSLHLKRYYGRILHYLKAKEYSHCAWTIVRVEILRNFYFINRLTGYLRN

SEQ ID NO: 282 - protein, 166 aa, Homo sapiens
MSYNLLGFLQRSSNFQCQKLLWQLNGRLEYCLKDRMNFDIPEEIKQLQQFQKEDAALTIYEMLQNIFAIFRQDSSSTGWNETIVENLLANVYHQINHLKTVLEEKLEKEDFTRGKAMSSLHLKRYYGRILHYLKAKEYSHCAWTIVRVEILRNFYFINRLTGYLRN

SEQ ID NO: 283 - protein, 166 aa, Homo sapiens
MSYNLLGFLQRSSNFQCQKLLWQLNGRLEYCLKDRMNFDIPEEIKQLQQFQKEDAALTIYEMLQNIFAIFRQDSSSTGWNETIVENLLANVYHQINHLKTVLEEKLEKEDFTRGKLMSSVHLKRYYGRILHYLKAKEYSHCAWTIVRVEILRNFYFINRLTGYLRN

SEQ ID NO: 284 - protein, 166 aa, Homo sapiens
MSYNLLGFLQRSSNFQCQKLLWQLNGRLEYCLKDRMNFDIPEEIKQLQQFQKEDAALTIYEMLQNIFAIFRQDSSSTGWNETIVENLLANVYHQINHLKTVLEEKLEKEDFTRGKLMSSIHLKRYYGRILHYLKAKEYSHCAWTIVRVEILRNFYFINRLTGYLRN

SEQ ID NO: 285 - protein, 166 aa, Homo sapiens
MSYNLLGFLQRSSNFQCQKLLWQLNGRLEYCLKDRMNFDIPEEIKQLQQFQKEDAALTIYEMLQNIFAIFRQDSSSTGWNETIVENLLANVYHQINHLKTVLEEKLEKEDFTRGKLMSSTHLKRYYGRILHYLKAKEYSHCAWTIVRVEILRNFYFINRLTGYLRN

SEQ ID NO: 286 - protein, 166 aa, Homo sapiens
MSYNLLGFLQRSSNFQCQKLLWQLNGRLEYCLKDRMNFDIPEEIKQLQQFQKEDAALTIYEMLQNIFAIFRQDSSSTGWNETIVENLLANVYHQINHLKTVLEEKLEKEDFTRGKLMSSQHLKRYYGRILHYLKAKEYSHCAWTIVRVEILRNFYFINRLTGYLRN

SEQ ID NO: 287 - protein, 166 aa, Homo sapiens
MSYNLLGFLQRSSNFQCQKLLWQLNGRLEYCLKDRMNFDIPEEIKQLQQFQKEDAALTIYEMLQNIFAIFRQDSSSTGWNETIVENLLANVYHQINHLKTVLEEKLEKEDFTRGKLMSSHHLKRYYGRILHYLKAKEYSHCAWTIVRVEILRNFYFINRLTGYLRN

SEQ ID NO: 288 - protein, 166 aa, Homo sapiens
MSYNLLGFLQRSSNFQCQKLLWQLNGRLEYCLKDRMNFDIPEEIKQLQQFQKEDAALTIYEMLQNIFAIFRQDSSSTGWNETIVENLLANVYHQINHLKTVLEEKLEKEDFTRGKLMSSAHLKRYYGRILHYLKAKEYSHCAWTIVRVEILRNFYFINRLTGYLRN

SEQ ID NO: 289 - protein, 166 aa, Homo sapiens
MSYNLLGFLQRSSNFQCQKLLWQLNGRLEYCLKDRMNFDIPEEIKQLQQFQKEDAALTIYEMLQNIFAIFRQDSSSTGWNETIVENLLANVYHQINHLKTVLEEKLEKEDFTRGKLMSSLHLQRYYGRILHYLKAKEYSHCAWTIVRVEILRNFYFINRLTGYLRN

SEQ ID NO: 290 - protein, 100 aa, Homo sapiens
CYCQDPYVKEAENLKKYFNAGHSDVADNGTLFVGILKNWKEESDRKIMQSQIVSFYFKLFKNFKDDQSIQKSVETIKEDMNVKFFNSNKKKRDDFEKLTN

SEQ ID NO: 291 - protein, 100 aa, Homo sapiens
CYCQDPYVKEAENLKKYFNAGHSDVADNGTLFIGILKNWKEESDRKIMQSQIVSFYFKLFKNFKDDQSIQKSVETIKEDMNVKFFNSNKKKRDDFEKLTN

SEQ ID NO: 292 - protein, 100 aa, Homo sapiens
CYCQDPYVKEAENLKKYFNAGHSDVADNGTLFLGILQNWKEESDRKIMQSQIVSFYFKLFKNFKDDQSIQKSVETIKEDMNVKFFNSNKKKRDDFEKLTN

SEQ ID NO: 293 - protein, 100 aa, Homo sapiens
CYCQDPYVKEAENLKKYFNAGHSDVADNGTLFLGILNNWKEESDRKIMQSQIVSFYFKLFKNFKDDQSIQKSVETIKEDMNVKFFNSNKKKRDDFEKLTN

SEQ ID NO: 294 - protein, 100 aa, Homo sapiens
CYCQDPYVKEAENLKKYFNAGHSDVADNGTLFLGILKNWQEESDRKIMQSQIVSFYFKLFKNFKDDQSIQKSVETIKEDMNVKFFNSNKKKRDDFEKLTN

SEQ ID NO: 295 - protein, 100 aa, Homo sapiens
CYCQDPYVKEAENLKKYFNAGHSDVADNGTLFLGILKNWNEESDRKIMQSQIVSFYFKLFKNFKDDQSIQKSVETIKEDMNVKFFNSNKKKRDDFEKLTN

SEQ ID NO: 296 - protein, 100 aa, Homo sapiens
CYCQDPYVKEAENLKKYFNAGHSDVADNGTLFLGILKNWKQESDRKIMQSQIVSFYFKLFKNFKDDQSIQKSVETIKEDMNVKFFNSNKKKRDDFEKLTN

SEQ ID NO: 297 - protein, 100 aa, Homo sapiens
CYCQDPYVKEAENLKKYFNAGHSDVADNGTLFLGILKNWKNESDRKIMQSQIVSFYFKLFKNFKDDQSIQKSVETIKEDMNVKFFNSNKKKRDDFEKLTN

SEQ ID NO: 298 - protein, 100 aa, Homo sapiens
CYCQDPYVKEAENLKKYFNAGHSDVADNGTLFLGILKNWKHESDRKIMQSQIVSFYFKLFKNFKDDQSIQKSVETIKEDMNVKFFNSNKKKRDDFEKLTN

SEQ ID NO: 299 - protein, 100 aa, Homo sapiens
CYCQDPYVKEAENLKKYFNAGHSDVADNGTLFLGILKNWKEQSDRKIMQSQIVSFYFKLFKNFKDDQSIQKSVETIKEDMNVKFFNSNKKKRDDFEKLTN

SEQ ID NO: 300 - protein, 100 aa, Homo sapiens
CYCQDPYVKEAENLKKYFNAGHSDVADNGTLFLGILKNWKENSDRKIMQSQIVSFYFKLFKNFKDDQSIQKSVETIKEDMNVKFFNSNKKKRDDFEKLTN

SEQ ID NO: 301 - protein, 100 aa, Homo sapiens
CYCQDPYVKEAENLKKYFNAGHSDVADNGTLFLGILKNWKEHSDRKIMQSQIVSFYFKLFKNFKDDQSIQKSVETIKEDMNVKFFNSNKKKRDDFEKLTN

SEQ ID NO: 302 - protein, 100 aa, Homo sapiens
CYCQDPYVKEAENLKKYFNAGHSDVADNGTLFLGILKNWKEESDRKIMQSQIVSFYFQLFKNFKDDQSIQKSVETIKEDMNVKFFNSNKKKRDDFEKLTN

SEQ ID NO: 303 - protein, 100 aa, Homo sapiens
CYCQDPYVKEAENLKKYFNAGHSDVADNGTLFLGILKNWKEESDRKIMQSQIVSFYFNLFKNFKDDQSIQKSVETIKEDMNVKFFNSNKKKRDDFEKLTN

SEQ ID NO: 304 - protein, 100 aa, Homo sapiens
CYCQDPYVKEAENLKKYFNAGHSDVADNGTLFLGILKNWKEESDRKIMQSQIVSFYFKLFQNFKDDQSIQKSVETIKEDMNVKFFNSNKKKRDDFEKLTN

SEQ ID NO: 305 - protein, 100 aa, Homo sapiens
CYCQDPYVKEAENLKKYFNAGHSDVADNGTLFLGILKNWKEESDRKIMQSQIVSFYFKLFNNFKDDQSIQKSVETIKEDMNVKFFNSNKKKRDDFEKLTN

SEQ ID NO: 306 - protein, 100 aa, Homo sapiens
CYCQDPYVKEAENLKKYFNAGHSDVADNGTLFLGILKNWKEESDRKIMQSQIVSFYFKLFKNFQDDQSIQKSVETIKEDMNVKFFNSNKKKRDDFEKLTN

SEQ ID NO: 307 - protein, 100 aa, Homo sapiens
CYCQDPYVKEAENLKKYFNAGHSDVADNGTLFLGILKNWKEESDRKIMQSQIVSFYFKLFKNFNDDQSIQKSVETIKEDMNVKFFNSNKKKRDDFEKLTN

SEQ ID NO: 308 - protein, 100 aa, Homo sapiens
CYCQDPYVKEAENLKKYFNAGHSDVADNGTLFLGILKNWKEESDRKIMQSQIVSFYFKLFKNFKQDQSIQKSVETIKEDMNVKFFNSNKKKRDDFEKLTN

SEQ ID NO: 309 - protein, 100 aa, Homo sapiens
CYCQDPYVKEAENLKKYFNAGHSDVADNGTLFLGILKNWKEESDRKIMQSQIVSFYFKLFKNFKNDQSIQKSVETIKEDMNVKFFNSNKKKRDDFEKLTN

SEQ ID NO: 310 - protein, 100 aa, Homo sapiens
CYCQDPYVKEAENLKKYFNAGHSDVADNGTLFLGILKNWKEESDRKIMQSQIVSFYFKLFKNFKDQQSIQKSVETIKEDMNVKFFNSNKKKRDDFEKLTN

SEQ ID NO: 311 - protein, 100 aa, Homo sapiens
CYCQDPYVKEAENLKKYFNAGHSDVADNGTLFLGILKNWKEESDRKIMQSQIVSFYFKLFKNFKDNQSIQKSVETIKEDMNVKFFNSNKKKRDDFEKLTN

SEQ ID NO: 312-361 - skipped (50 entries)

SEQ ID NO: 362 - protein, 127 aa, Homo sapiens
APARSPSPSTQPWEHVNAIQEARRLLNLSRDTAAEMNQTVEVISEMFDLQEPTCLQTRLELYKQGLRGSLTKLKGPLTMMASHYKQHCPPTPETSCATQIITFESFKENLKDFLLVIPFDCWEPVQE

SEQ ID NO: 363 - protein, 127 aa, Homo sapiens
APARSPSPSTQPWEHVNAIQEARRLLNLSRDTAAEMNNTVEVISEMFDLQEPTCLQTRLELYKQGLRGSLTKLKGPLTMMASHYKQHCPPTPETSCATQIITFESFKENLKDFLLVIPFDCWEPVQE

SEQ ID NO: 364 - protein, 127 aa, Homo sapiens
APARSPSPSTQPWEHVNAIQEARRLLNLSRDTAAEMNHTVEVISEMFDLQEPTCLQTRLELYKQGLRGSLTKLKGPLTMMASHYKQHCPPTPETSCATQIITFESFKENLKDFLLVIPFDCWEPVQE

SEQ ID NO: 365 - protein, 127 aa, Homo sapiens
APARSPSPSTQPWEHVNAIQEARRLLNLSRDTAAEMNETVQVISEMFDLQEPTCLQTRLELYKQGLRGSLTKLKGPLTMMASHYKQHCPPTPETSCATQIITFESFKENLKDFLLVIPFDCWEPVQE

SEQ ID NO: 366 - protein, 127 aa, Homo sapiens
APARSPSPSTQPWEHVNAIQEARRLLNLSRDTAAEMNETVNVISEMFDLQEPTCLQTRLELYKQGLRGSLTKLKGPLTMMASHYKQHCPPTPETSCATQIITFESFKENLKDFLLVIPFDCWEPVQE

SEQ ID NO: 367 - protein, 127 aa, Homo sapiens
APARSPSPSTQPWEHVNAIQEARRLLNLSRDTAAEMNETVHVISEMFDLQEPTCLQTRLELYKQGLRGSLTKLKGPLTMMASHYKQHCPPTPETSCATQIITFESFKENLKDFLLVIPFDCWEPVQE

SEQ ID NO: 368 - protein, 127 aa, Homo sapiens
APARSPSPSTQPWEHVNAIQEARRLLNLSRDTAAEMNETVEVISQMFDLQEPTCLQTRLELYKQGLRGSLTKLKGPLTMMASHYKQHCPPTPETSCATQIITFESFKENLKDFLLVIPFDCWEPVQE

SEQ ID NO: 369 - protein, 127 aa, Homo sapiens
APARSPSPSTQPWEHVNAIQEARRLLNLSRDTAAEMNETVEVISNMFDLQEPTCLQTRLELYKQGLRGSLTKLKGPLTMMASHYKQHCPPTPETSCATQIITFESFKENLKDFLLVIPFDCWEPVQE

SEQ ID NO: 370 - protein, 127 aa, Homo sapiens
APARSPSPSTQPWEHVNAIQEARRLLNLSRDTAAEMNETVEVISHMFDLQEPTCLQTRLELYKQGLRGSLTKLKGPLTMMASHYKQHCPPTPETSCATQIITFESFKENLKDFLLVIPFDCWEPVQE

SEQ ID NO: 371 - protein, 127 aa, Homo sapiens
APARSPSPSTQPWEHVNAIQEARRLLNLSRDTAAEMNETVEVISEVFDLQEPTCLQTRLELYKQGLRGSLTKLKGPLTMMASHYKQHCPPTPETSCATQIITFESFKENLKDFLLVIPFDCWEPVQE

SEQ ID NO: 372 - protein, 127 aa, Homo sapiens
APARSPSPSTQPWEHVNAIQEARRLLNLSRDTAAEMNETVEVISEIFDLQEPTCLQTRLELYKQGLRGSLTKLKGPLTMMASHYKQHCPPTPETSCATQIITFESFKENLKDFLLVIPFDCWEPVQE

SEQ ID NO: 373 - protein, 127 aa, Homo sapiens
APARSPSPSTQPWEHVNAIQEARRLLNLSRDTAAEMNETVEVISEMFQLQEPTCLQTRLELYKQGLRGSLTKLKGPLTMMASHYKQHCPPTPETSCATQIITFESFKENLKDFLLVIPFDCWEPVQE

SEQ ID NO: 374 - protein, 127 aa, Homo sapiens
APARSPSPSTQPWEHVNAIQEARRLLNLSRDTAAEMNETVEVISEMFNLQEPTCLQTRLELYKQGLRGSLTKLKGPLTMMASHYKQHCPPTPETSCATQIITFESFKENLKDFLLVIPFDCWEPVQE

SEQ ID NO: 375 - protein, 127 aa, Homo sapiens
APARSPSPSTQPWEHVNAIQEARRLLNLSRDTAAEMNETVEVISEMFDVQEPTCLQTRLELYKQGLRGSLTKLKGPLTMMASHYKQHCPPTPETSCATQIITFESFKENLKDFLLVIPFDCWEPVQE

SEQ ID NO: 376 - protein, 127 aa, Homo sapiens
APARSPSPSTQPWEHVNAIQEARRLLNLSRDTAAEMNETVEVISEMFDIQEPTCLQTRLELYKQGLRGSLTKLKGPLTMMASHYKQHCPPTPETSCATQIITFESFKENLKDFLLVIPFDCWEPVQE

SEQ ID NO: 377 - protein, 127 aa, Homo sapiens
APARSPSPSTQPWEHVNAIQEARRLLNLSRDTAAEMNETVEVISEMFDLQQPTCLQTRLELYKQGLRGSLTKLKGPLTMMASHYKQHCPPTPETSCATQIITFESFKENLKDFLLVIPFDCWEPVQE

SEQ ID NO: 378 - protein, 127 aa, Homo sapiens
APARSPSPSTQPWEHVNAIQEARRLLNLSRDTAAEMNETVEVISEMFDLQNPTCLQTRLELYKQGLRGSLTKLKGPLTMMASHYKQHCPPTPETSCATQIITFESFKENLKDFLLVIPFDCWEPVQE

SEQ ID NO: 379 - protein, 127 aa, Homo sapiens
APARSPSPSTQPWEHVNAIQEARRLLNLSRDTAAEMNETVEVISEMFDLQHPTCLQTRLELYKQGLRGSLTKLKGPLTMMASHYKQHCPPTPETSCATQIITFESFKENLKDFLLVIPFDCWEPVQE

SEQ ID NO: 380 - protein, 127 aa, Homo sapiens
APARSPSPSTQPWEHVNAIQEARRLLNLSRDTAAEMNETVEVISEMFDLQEPTCLQTRLQLYKQGLRGSLTKLKGPLTMMASHYKQHCPPTPETSCATQIITFESFKENLKDFLLVIPFDCWEPVQE

SEQ ID NO: 381 - protein, 127 aa, Homo sapiens
APARSPSPSTQPWEHVNAIQEARRLLNLSRDTAAEMNETVEVISEMFDLQEPTCLQTRLNLYKQGLRGSLTKLKGPLTMMASHYKQHCPPTPETSCATQIITFESFKENLKDFLLVIPFDCWEPVQE

SEQ ID NO: 382 - protein, 127 aa, Homo sapiens
APARSPSPSTQPWEHVNAIQEARRLLNLSRDTAAEMNETVEVISEMFDLQEPTCLQTRLHLYKQGLRGSLTKLKGPLTMMASHYKQHCPPTPETSCATQIITFESFKENLKDFLLVIPFDCWEPVQE

SEQ ID NO: 383 - protein, 127 aa, Homo sapiens
APARSPSPSTQPWEHVNAIQEARRLLNLSRDTAAEMNETVEVISEMFDLQEPTCLQTRLELYQQGLRGSLTKLKGPLTMMASHYKQHCPPTPETSCATQIITFESFKENLKDFLLVIPFDCWEPVQE

SEQ ID NO: 384 - protein, 127 aa, Homo sapiens
APARSPSPSTQPWEHVNAIQEARRLLNLSRDTAAEMNETVEVISEMFDLQEPTCLQTRLELYNQGLRGSLTKLKGPLTMMASHYKQHCPPTPETSCATQIITFESFKENLKDFLLVIPFDCWEPVQE

SEQ ID NO: 385 - protein, 127 aa, Homo sapiens
APARSPSPSTQPWEHVNAIQEARRLLNLSRDTAAEMNETVEVISEMFDLQEPTCLQTRLELYKQGLHGSLTKLKGPLTMMASHYKQHCPPTPETSCATQIITFESFKENLKDFLLVIPFDCWEPVQE

SEQ ID NO: 386 - protein, 127 aa, Homo sapiens
APARSPSPSTQPWEHVNAIQEARRLLNLSRDTAAEMNETVEVISEMFDLQEPTCLQTRLELYKQGLQGSLTKLKGPLTMMASHYKQHCPPTPETSCATQIITFESFKENLKDFLLVIPFDCWEPVQE

SEQ ID NO: 387 - protein, 127 aa, Homo sapiens
APARSPSPSTQPWEHVNAIQEARRLLNLSRDTAAEMNETVEVISEMFDLQEPTCLQTRLELYKQGLRGSLTKLKGPLTMMASHYKQHCPPTSETSCATQIITFESFKENLKDFLLVIPFDCWEPVQE

SEQ ID NO: 388 - protein, 127 aa, Homo sapiens
APARSPSPSTQPWEHVNAIQEARRLLNLSRDTAAEMNETVEVISEMFDLQEPTCLQTRLELYKQGLRGSLTKLKGPLTMMASHYKQHCPPTAETSCATQIITFESFKENLKDFLLVIPFDCWEPVQE

SEQ ID NO: 389 - protein, 127 aa, Homo sapiens
APARSPSPSTQPWEHVNAIQEARRLLNLSRDTAAEMNETVEVISEMFDLQEPTCLQTRLELYKQGLRGSLTKLKGPLTMMASHYKQHCPPTPQTSCATQIITFESFKENLKDFLLVIPFDCWEPVQE

SEQ ID NO: 390 - protein, 127 aa, Homo sapiens
APARSPSPSTQPWEHVNAIQEARRLLNLSRDTAAEMNETVEVISEMFDLQEPTCLQTRLELYKQGLRGSLTKLKGPLTMMASHYKQHCPPTPNTSCATQIITFESFKENLKDFLLVIPFDCWEPVQE

SEQ ID NO: 391 - protein, 127 aa, Homo sapiens
APARSPSPSTQPWEHVNAIQEARRLLNLSRDTAAEMNETVEVISEMFDLQEPTCLQTRLELYKQGLRGSLTKLKGPLTMMASHYKQHCPPTPHTSCATQIITFESFKENLKDFLLVIPFDCWEPVQE

SEQ ID NO: 392 - protein, 127 aa, Homo sapiens
APARSPSPSTQPWEHVNAIQEARRLLNLSRDTAAEMNETVEVISEMFDLQEPTCLQTRLELYKQGLRGSLTKLKGPLTMMASHYKQHCPPTPETSCATQIITFESFKENLKDFLLVIPIDCWEPVQE

SEQ ID NO: 393 - protein, 127 aa, Homo sapiens
APARSPSPSTQPWEHVNAIQEARRLLNLSRDTAAEMNETVEVISEMFDLQEPTCLQTRLELYKQGLRGSLTKLKGPLTMMASHYKQHCPPTPETSCATQIITFESFKENLKDFLLVIPVDCWEPVQE

SEQ ID NO: 394 - protein, 127 aa, Homo sapiens
APARSPSPSTQPWEHVNAIQEARRLLNLSRDTAAEMNETVEVISEMFDLQEPTCLQTRLELYKQGLRGSLTKLKGPLTMMASHYKQHCPPTPETSCATQIITFESFKENLKDFLLVIPFQCWEPVQE

SEQ ID NO: 395 - protein, 127 aa, Homo sapiens
APARSPSPSTQPWEHVNAIQEARRLLNLSRDTAAEMNETVEVISEMFDLQEPTCLQTRLELYKQGLRGSLTKLKGPLTMMASHYKQHCPPTPETSCATQIITFESFKENLKDFLLVIPFNCWEPVQE

SEQ ID NO: 396 - protein, 127 aa, Homo sapiens
APARSPSPSTQPWEHVNAIQEARRLLNLSRDTAAEMNETVEVISEMFDLQEPTCLQTRLELYKQGLRGSLTKLKGPLTMMASHYKQHCPPTPETSCATQIITFESFKENLKDFLLVIPFDCWQPVQE

SEQ ID NO: 397 - protein, 127 aa, Homo sapiens
APARSPSPSTQPWEHVNAIQEARRLLNLSRDTAAEMNETVEVISEMFDLQEPTCLQTRLELYKQGLRGSLTKLKGPLTMMASHYKQHCPPTPETSCATQIITFESFKENLKDFLLVIPFDCWNPVQE

SEQ ID NO: 398 - protein, 127 aa, Homo sapiens
APARSPSPSTQPWEHVNAIQEARRLLNLSRDTAAEMNETVEVISEMFDLQEPTCLQTRLELYKQGLRGSLTKLKGPLTMMASHYKQHCPPTPETSCATQIITFESFKENLKDFLLVIPFDCWHPVQE

SEQ ID NO: 399 - protein, 127 aa, Homo sapiens
APARSPSPSTQPWEHVNAIQEARRLLNLSRDTAAEMNETVEVISEMFDLQEPTCLQTRLELYKQGLRGSLTKLKGPLTMMASHYKQHCPPTPETSCATQIITFESFKENLKDFLLVIPFDCWESVQE

SEQ ID NO: 400 - protein, 127 aa, Homo sapiens
APARSPSPSTQPWEHVNAIQEARRLLNLSRDTAAEMNETVEVISEMFDLQEPTCLQTRLELYKQGLRGSLTKLKGPLTMMASHYKQHCPPTPETSCATQIITFESFKENLKDFLLVIPFDCWEAVQE

SEQ ID NO: 401-630 - skipped (230 entries)

SEQ ID NO: 631 - protein, 177 aa, homo sapiens
TPLGPASSLPQSFLLKCLEQVRKIQGDGAALQEKLVSECATYKLCHPEELVLLGHSLGIPSAPLSSCPSQALQLAGCLSQLHSGLFLYQGLLQALEGISPELGPTLDTLQLDVADFATTIWQQMEELGMAPALQPTQGAMPAFASAFQRRAGGVLVASHLQSFLEVSYRVLRHLAQP

SEQ ID NO: 632 - protein, 177 aa, homo sapiens
TPLGPASSLPQSFLLKCLEQVRKIQGDGAALQEKLVSECATYKLCHPEELVLLGHSLGIPHAPLSSCPSQALQLAGCLSQLHSGLFLYQGLLQALEGISPELGPTLDTLQLDVADFATTIWQQMEELGMAPALQPTQGAMPAFASAFQRRAGGVLVASHLQSFLEVSYRVLRHLAQP

SEQ ID NO: 633 - protein, 177 aa, homo sapiens
TPLGPASSLPQSFLLKCLEQVRKIQGDGAALQEKLVSECATYKLCHPEELVLLGHSLGIPWASLSSCPSQALQLAGCLSQLHSGLFLYQGLLQALEGISPELGPTLDTLQLDVADFATTIWQQMEELGMAPALQPTQGAMPAFASAFQRRAGGVLVASHLQSFLEVSYRVLRHLAQP

SEQ ID NO: 634 - protein, 177 aa, homo sapiens
TPLGPASSLPQSFLLKCLEQVRKIQGDGAALQEKLVSECATYKLCHPEELVLLGHSLGIPWAALSSCPSQALQLAGCLSQLHSGLFLYQGLLQALEGISPELGPTLDTLQLDVADFATTIWQQMEELGMAPALQPTQGAMPAFASAFQRRAGGVLVASHLQSFLEVSYRVLRHLAQP

SEQ ID NO: 635 - protein, 177 aa, homo sapiens
TPLGPASSLPQSFLLKCLEQVRKIQGDGAALQEKLVSECATYKLCHPEELVLLGHSLGIPWAPLSSCSSQALQLAGCLSQLHSGLFLYQGLLQALEGISPELGPTLDTLQLDVADFATTIWQQMEELGMAPALQPTQGAMPAFASAFQRRAGGVLVASHLQSFLEVSYRVLRHLAQP

SEQ ID NO: 636 - protein, 177 aa, homo sapiens
TPLGPASSLPQSFLLKCLEQVRKIQGDGAALQEKLVSECATYKLCHPEELVLLGHSLGIPWAPLSSCASQALQLAGCLSQLHSGLFLYQGLLQALEGISPELGPTLDTLQLDVADFATTIWQQMEELGMAPALQPTQGAMPAFASAFQRRAGGVLVASHLQSFLEVSYRVLRHLAQP

SEQ ID NO: 637 - protein, 177 aa, homo sapiens
TPLGPASSLPQSFLLKCLEQVRKIQGDGAALQEKLVSECATYKLCHPEELVLLGHSLGIPWAPLSSCPSQAVQLAGCLSQLHSGLFLYQGLLQALEGISPELGPTLDTLQLDVADFATTIWQQMEELGMAPALQPTQGAMPAFASAFQRRAGGVLVASHLQSFLEVSYRVLRHLAQP

SEQ ID NO: 638 - protein, 177 aa, homo sapiens
TPLGPASSLPQSFLLKCLEQVRKIQGDGAALQEKLVSECATYKLCHPEELVLLGHSLGIPWAPLSSCPSQAIQLAGCLSQLHSGLFLYQGLLQALEGISPELGPTLDTLQLDVADFATTIWQQMEELGMAPALQPTQGAMPAFASAFQRRAGGVLVASHLQSFLEVSYRVLRHLAQP

SEQ ID NO: 639 - protein, 177 aa, homo sapiens
TPLGPASSLPQSFLLKCLEQVRKIQGDGAALQEKLVSECATYKLCHPEELVLLGHSLGIPWAPLSSCPSQALQLAGCLSQLHSGLILYQGLLQALEGISPELGPTLDTLQLDVADFATTIWQQMEELGMAPALQPTQGAMPAFASAFQRRAGGVLVASHLQSFLEVSYRVLRHLAQP

SEQ ID NO: 640 - protein, 177 aa, homo sapiens
TPLGPASSLPQSFLLKCLEQVRKIQGDGAALQEKLVSECATYKLCHPEELVLLGHSLGIPWAPLSSCPSQALQLAGCLSQLHSGLVLYQGLLQALEGISPELGPTLDTLQLDVADFATTIWQQMEELGMAPALQPTQGAMPAFASAFQRRAGGVLVASHLQSFLEVSYRVLRHLAQP

SEQ ID NO: 641 - protein, 177 aa, homo sapiens
TPLGPASSLPQSFLLKCLEQVRKIQGDGAALQEKLVSECATYKLCHPEELVLLGHSLGIPWAPLSSCPSQALQLAGCLSQLHSGLFLYQGLLQALQGISPELGPTLDTLQLDVADFATTIWQQMEELGMAPALQPTQGAMPAFASAFQRRAGGVLVASHLQSFLEVSYRVLRHLAQP

SEQ ID NO: 642 - protein, 177 aa, homo sapiens
TPLGPASSLPQSFLLKCLEQVRKIQGDGAALQEKLVSECATYKLCHPEELVLLGHSLGIPWAPLSSCPSQALQLAGCLSQLHSGLFLYQGLLQALNGISPELGPTLDTLQLDVADFATTIWQQMEELGMAPALQPTQGAMPAFASAFQRRAGGVLVASHLQSFLEVSYRVLRHLAQP

SEQ ID NO: 643 - protein, 177 aa, homo sapiens
TPLGPASSLPQSFLLKCLEQVRKIQGDGAALQEKLVSECATYKLCHPEELVLLGHSLGIPWAPLSSCPSQALQLAGCLSQLHSGLFLYQGLLQALHGISPELGPTLDTLQLDVADFATTIWQQMEELGMAPALQPTQGAMPAFASAFQRRAGGVLVASHLQSFLEVSYRVLRHLAQP

SEQ ID NO: 644 - protein, 177 aa, homo sapiens
TPLGPASSLPQSFLLKCLEQVRKIQGDGAALQEKLVSECATYKLCHPEELVLLGHSLGIPWAPLSSCPSQALQLAGCLSQLHSGLFLYQGLLQALEGISSELGPTLDTLQLDVADFATTIWQQMEELGMAPALQPTQGAMPAFASAFQRRAGGVLVASHLQSFLEVSYRVLRHLAQP

SEQ ID NO: 645 - protein, 177 aa, homo sapiens
TPLGPASSLPQSFLLKCLEQVRKIQGDGAALQEKLVSECATYKLCHPEELVLLGHSLGIPWAPLSSCPSQALQLAGCLSQLHSGLFLYQGLLQALEGISAELGPTLDTLQLDVADFATTIWQQMEELGMAPALQPTQGAMPAFASAFQRRAGGVLVASHLQSFLEVSYRVLRHLAQP

SEQ ID NO: 646 - protein, 177 aa, homo sapiens
TPLGPASSLPQSFLLKCLEQVRKIQGDGAALQEKLVSECATYKLCHPEELVLLGHSLGIPWAPLSSCPSQALQLAGCLSQLHSGLFLYQGLLQALEGISPQLGPTLDTLQLDVADFATTIWQQMEELGMAPALQPTQGAMPAFASAFQRRAGGVLVASHLQSFLEVSYRVLRHLAQP

SEQ ID NO: 647 - protein, 177 aa, homo sapiens
TPLGPASSLPQSFLLKCLEQVRKIQGDGAALQEKLVSECATYKLCHPEELVLLGHSLGIPWAPLSSCPSQALQLAGCLSQLHSGLFLYQGLLQALEGISPNLGPTLDTLQLDVADFATTIWQQMEELGMAPALQPTQGAMPAFASAFQRRAGGVLVASHLQSFLEVSYRVLRHLAQP

SEQ ID NO: 648 - protein, 177 aa, homo sapiens
TPLGPASSLPQSFLLKCLEQVRKIQGDGAALQEKLVSECATYKLCHPEELVLLGHSLGIPWAPLSSCPSQALQLAGCLSQLHSGLFLYQGLLQALEGISPHLGPTLDTLQLDVADFATTIWQQMEELGMAPALQPTQGAMPAFASAFQRRAGGVLVASHLQSFLEVSYRVLRHLAQP

SEQ ID NO: 649 - protein, 177 aa, homo sapiens
TPLGPASSLPQSFLLKCLEQVRKIQGDGAALQEKLVSECATYKLCHPEELVLLGHSLGIPWAPLSSCPSQALQLAGCLSQLHSGLFLYQGLLQALEGISPELGPTLDTLQLDVADFATTIWQQMEELGMASALQPTQGAMPAFASAFQRRAGGVLVASHLQSFLEVSYRVLRHLAQP

SEQ ID NO: 650 - protein, 177 aa, homo sapiens
TPLGPASSLPQSFLLKCLEQVRKIQGDGAALQEKLVSECATYKLCHPEELVLLGHSLGIPWAPLSSCPSQALQLAGCLSQLHSGLFLYQGLLQALEGISPELGPTLDTLQLDVADFATTIWQQMEELGMAAALQPTQGAMPAFASAFQRRAGGVLVASHLQSFLEVSYRVLRHLAQP

SEQ ID NO: 651 - protein, 177 aa, homo sapiens
TPLGPASSLPQSFLLKCLEQVRKIQGDGAALQEKLVSECATYKLCHPEELVLLGHSLGIPWAPLSSCPSQALQLAGCLSQLHSGLFLYQGLLQALEGISPELGPTLDTLQLDVADFATTIWQQMEELGMAPAVQPTQGAMPAFASAFQRRAGGVLVASHLQSFLEVSYRVLRHLAQP

SEQ ID NO: 652 - protein, 177 aa, homo sapiens
TPLGPASSLPQSFLLKCLEQVRKIQGDGAALQEKLVSECATYKLCHPEELVLLGHSLGIPWAPLSSCPSQALQLAGCLSQLHSGLFLYQGLLQALEGISPELGPTLDTLQLDVADFATTIWQQMEELGMAPAIQPTQGAMPAFASAFQRRAGGVLVASHLQSFLEVSYRVLRHLAQP

SEQ ID NO: 653 - protein, 177 aa, homo sapiens
TPLGPASSLPQSFLLKCLEQVRKIQGDGAALQEKLVSECATYKLCHPEELVLLGHSLGIPWAPLSSCPSQALQLAGCLSQLHSGLFLYQGLLQALEGISPELGPTLDTLQLDVADFATTIWQQMEELGMAPALQSTQGAMPAFASAFQRRAGGVLVASHLQSFLEVSYRVLRHLAQP

SEQ ID NO: 654 - protein, 177 aa, homo sapiens
TPLGPASSLPQSFLLKCLEQVRKIQGDGAALQEKLVSECATYKLCHPEELVLLGHSLGIPWAPLSSCPSQALQLAGCLSQLHSGLFLYQGLLQALEGISPELGPTLDTLQLDVADFATTIWQQMEELGMAPALQATQGAMPAFASAFQRRAGGVLVASHLQSFLEVSYRVLRHLAQP

SEQ ID NO: 655 - protein, 177 aa, homo sapiens
TPLGPASSLPQSFLLKCLEQVRKIQGDGAALQEKLVSECATYKLCHPEELVLLGHSLGIPWAPLSSCPSQALQLAGCLSQLHSGLFLYQGLLQALEGISPELGPTLDTLQLDVADFATTIWQQMEELGMAPALQPTQGAMPAFASAIQRRAGGVLVASHLQSFLEVSYRVLRHLAQP

SEQ ID NO: 656 - protein, 177 aa, homo sapiens
TPLGPASSLPQSFLLKCLEQVRKIQGDGAALQEKLVSECATYKLCHPEELVLLGHSLGIPWAPLSSCPSQALQLAGCLSQLHSGLFLYQGLLQALEGISPELGPTLDTLQLDVADFATTIWQQMEELGMAPALQPTQGAMPAFASAVQRRAGGVLVASHLQSFLEVSYRVLRHLAQP

SEQ ID NO: 657 - protein, 177 aa, homo sapiens
TPLGPASSLPQSFLLKCLEQVRKIQGDGAALQEKLVSECATYKLCHPEELVLLGHSLGIPWAPLSSCPSQALQLAGCLSQLHSGLFLYQGLLQALEGISPELGPTLDTLQLDVADFATTIWQQMEELGMAPALQPTQGAMPAFASAFQRRAGGVLVASHLQSFLEVSYHVLRHLAQP

SEQ ID NO: 658 - protein, 177 aa, homo sapiens
TPLGPASSLPQSFLLKCLEQVRKIQGDGAALQEKLVSECATYKLCHPEELVLLGHSLGIPWAPLSSCPSQALQLAGCLSQLHSGLFLYQGLLQALEGISPELGPTLDTLQLDVADFATTIWQQMEELGMAPALQPTQGAMPAFASAFQRRAGGVLVASHLQSFLEVSYQVLRHLAQP

SEQ ID NO: 659 - protein, 177 aa, homo sapiens
TPLGPASSLPQSFLLKCLEQVRKIQGDGAALQEKLVSECATYKLCHPEELVLLGHSLGIPWAPLSSCPSQALQLAGCLSQLHSGLFLYQGLLQALEGISPELGPTLDTLQLDVADFATTIWQQMEELGMAPALQPTQGAMPAFASAFQRRAGGVLVASHLQSFLEVSYRVLHHLAQP

SEQ ID NO: 660 - protein, 177 aa, homo sapiens
TPLGPASSLPQSFLLKCLEQVRKIQGDGAALQEKLVSECATYKLCHPEELVLLGHSLGIPWAPLSSCPSQALQLAGCLSQLHSGLFLYQGLLQALEGISPELGPTLDTLQLDVADFATTIWQQMEELGMAPALQPTQGAMPAFASAFQRRAGGVLVASHLQSFLEVSYRVLQHLAQP

SEQ ID NO: 661 - protein, 177 aa, homo sapiens
TPLGPASSLPQSFLLKCLEQVRKIQGDGAALQEKLVSECATYKLCHPEELVLLGHSLGIPWAPLSSCPSQALQLAGCLSQLHSGLFLYQGLLQALEGISPELGPTLDTLQLDVADFATTIWQQMEELGMAPALQPTQGAMPAFASAFQRRAGGVLVASHLQSFLEVSYRVLRHLAQS

SEQ ID NO: 662 - protein, 177 aa, homo sapiens
TPLGPASSLPQSFLLKCLEQVRKIQGDGAALQEKLVSECATYKLCHPEELVLLGHSLGIPWAPLSSCPSQALQLAGCLSQLHSGLFLYQGLLQALEGISPELGPTLDTLQLDVADFATTIWQQMEELGMAPALQPTQGAMPAFASAFQRRAGGVLVASHLQSFLEVSYRVLRHLAQA

SEQ ID NO: 663-849 - skipped (187 entries)

SEQ ID NO: 850 - protein, 191 aa, Homo sapiens
FPTIPLSRLFDNAMLRAHRLHQLAFDTYQEFEEAYIPKEQKYSFLQNPQTSLCFSQSIPTPSNREETQQKSNLELLRISLLLIQSWLEPVQFLRSVFANSLVYGASDSNVYDLLKDLEEGIQTLMGRLEDGSPRTGQIFKQTYSKFDTNSHNDDALLKNYGLLYCFRKDMDKVETFLRIVQCRSVEGSCGF

SEQ ID NO: 851 - protein, 191 aa, Homo sapiens
FPTIPLSRLFDNAMLRAHRLHQLAFDTYQEFEEAYIPKEQKYSFLQNPQTSLCFSNSIPTPSNREETQQKSNLELLRISLLLIQSWLEPVQFLRSVFANSLVYGASDSNVYDLLKDLEEGIQTLMGRLEDGSPRTGQIFKQTYSKFDTNSHNDDALLKNYGLLYCFRKDMDKVETFLRIVQCRSVEGSCGF

SEQ ID NO: 852 - protein, 191 aa, Homo sapiens
FPTIPLSRLFDNAMLRAHRLHQLAFDTYQEFEEAYIPKEQKYSFLQNPQTSLCFSHSIPTPSNREETQQKSNLELLRISLLLIQSWLEPVQFLRSVFANSLVYGASDSNVYDLLKDLEEGIQTLMGRLEDGSPRTGQIFKQTYSKFDTNSHNDDALLKNYGLLYCFRKDMDKVETFLRIVQCRSVEGSCGF

SEQ ID NO: 853 - protein, 191 aa, Homo sapiens
FPTIPLSRLFDNAMLRAHRLHQLAFDTYQEFEEAYIPKEQKYSFLQNPQTSLCFSESISTPSNREETQQKSNLELLRISLLLIQSWLEPVQFLRSVFANSLVYGASDSNVYDLLKDLEEGIQTLMGRLEDGSPRTGQIFKQTYSKFDTNSHNDDALLKNYGLLYCFRKDMDKVETFLRIVQCRSVEGSCGF

SEQ ID NO: 854 - protein, 191 aa, Homo sapiens
FPTIPLSRLFDNAMLRAHRLHQLAFDTYQEFEEAYIPKEQKYSFLQNPQTSLCFSESIATPSNREETQQKSNLELLRISLLLIQSWLEPVQFLRSVFANSLVYGASDSNVYDLLKDLEEGIQTLMGRLEDGSPRTGQIFKQTYSKFDTNSHNDDALLKNYGLLYCFRKDMDKVETFLRIVQCRSVEGSCGF

SEQ ID NO: 855 - protein, 191 aa, Homo sapiens
FPTIPLSRLFDNAMLRAHRLHQLAFDTYQEFEEAYIPKEQKYSFLQNPQTSLCFSESIPTPSNHEETQQKSNLELLRISLLLIQSWLEPVQFLRSVFANSLVYGASDSNVYDLLKDLEEGIQTLMGRLEDGSPRTGQIFKQTYSKFDTNSHNDDALLKNYGLLYCFRKDMDKVETFLRIVQCRSVEGSCGF

SEQ ID NO: 856 - protein, 191 aa, Homo sapiens
FPTIPLSRLFDNAMLRAHRLHQLAFDTYQEFEEAYIPKEQKYSFLQNPQTSLCFSESIPTPSNQEETQQKSNLELLRISLLLIQSWLEPVQFLRSVFANSLVYGASDSNVYDLLKDLEEGIQTLMGRLEDGSPRTGQIFKQTYSKFDTNSHNDDALLKNYGLLYCFRKDMDKVETFLRIVQCRSVEGSCGF

SEQ ID NO: 857 - protein, 191 aa, Homo sapiens
FPTIPLSRLFDNAMLRAHRLHQLAFDTYQEFEEAYIPKEQKYSFLQNPQTSLCFSESIPTPSNRQETQQKSNLELLRISLLLIQSWLEPVQFLRSVFANSLVYGASDSNVYDLLKDLEEGIQTLMGRLEDGSPRTGQIFKQTYSKFDTNSHNDDALLKNYGLLYCFRKDMDKVETFLRIVQCRSVEGSCGF

SEQ ID NO: 858 - protein, 191 aa, Homo sapiens
FPTIPLSRLFDNAMLRAHRLHQLAFDTYQEFEEAYIPKEQKYSFLQNPQTSLCFSESIPTPSNRNETQQKSNLELLRISLLLIQSWLEPVQFLRSVFANSLVYGASDSNVYDLLKDLEEGIQTLMGRLEDGSPRTGQIFKQTYSKFDTNSHNDDALLKNYGLLYCFRKDMDKVETFLRIVQCRSVEGSCGF

SEQ ID NO: 859 - protein, 191 aa, Homo sapiens
FPTIPLSRLFDNAMLRAHRLHQLAFDTYQEFEEAYIPKEQKYSFLQNPQTSLCFSESIPTPSNRHETQQKSNLELLRISLLLIQSWLEPVQFLRSVFANSLVYGASDSNVYDLLKDLEEGIQTLMGRLEDGSPRTGQIFKQTYSKFDTNSHNDDALLKNYGLLYCFRKDMDKVETFLRIVQCRSVEGSCGF

SEQ ID NO: 860 - protein, 191 aa, Homo sapiens
FPTIPLSRLFDNAMLRAHRLHQLAFDTYQEFEEAYIPKEQKYSFLQNPQTSLCFSESIPTPSNREQTQQKSNLELLRISLLLIQSWLEPVQFLRSVFANSLVYGASDSNVYDLLKDLEEGIQTLMGRLEDGSPRTGQIFKQTYSKFDTNSHNDDALLKNYGLLYCFRKDMDKVETFLRIVQCRSVEGSCGF

SEQ ID NO: 861 - protein, 191 aa, Homo sapiens
FPTIPLSRLFDNAMLRAHRLHQLAFDTYQEFEEAYIPKEQKYSFLQNPQTSLCFSESIPTPSNRENTQQKSNLELLRISLLLIQSWLEPVQFLRSVFANSLVYGASDSNVYDLLKDLEEGIQTLMGRLEDGSPRTGQIFKQTYSKFDTNSHNDDALLKNYGLLYCFRKDMDKVETFLRIVQCRSVEGSCGF

SEQ ID NO: 862 - protein, 191 aa, Homo sapiens
FPTIPLSRLFDNAMLRAHRLHQLAFDTYQEFEEAYIPKEQKYSFLQNPQTSLCFSESIPTPSNREHTQQKSNLELLRISLLLIQSWLEPVQFLRSVFANSLVYGASDSNVYDLLKDLEEGIQTLMGRLEDGSPRTGQIFKQTYSKFDTNSHNDDALLKNYGLLYCFRKDMDKVETFLRIVQCRSVEGSCGF

SEQ ID NO: 863 - protein, 191 aa, Homo sapiens
FPTIPLSRLFDNAMLRAHRLHQLAFDTYQEFEEAYIPKEQKYSFLQNPQTSLCFSESIPTPSNREETQQKSNLELLRISLLLIQSWLQPVQFLRSVFANSLVYGASDSNVYDLLKDLEEGIQTLMGRLEDGSPRTGQIFKQTYSKFDTNSHNDDALLKNYGLLYCFRKDMDKVETFLRIVQCRSVEGSCGF

SEQ ID NO: 864 - protein, 191 aa, Homo sapiens
FPTIPLSRLFDNAMLRAHRLHQLAFDTYQEFEEAYIPKEQKYSFLQNPQTSLCFSESIPTPSNREETQQKSNLELLRISLLLIQSWLNPVQFLRSVFANSLVYGASDSNVYDLLKDLEEGIQTLMGRLEDGSPRTGQIFKQTYSKFDTNSHNDDALLKNYGLLYCFRKDMDKVETFLRIVQCRSVEGSCGF

SEQ ID NO: 865 - protein, 191 aa, Homo sapiens
FPTIPLSRLFDNAMLRAHRLHQLAFDTYQEFEEAYIPKEQKYSFLQNPQTSLCFSESIPTPSNREETQQKSNLELLRISLLLIQSWLHPVQFLRSVFANSLVYGASDSNVYDLLKDLEEGIQTLMGRLEDGSPRTGQIFKQTYSKFDTNSHNDDALLKNYGLLYCFRKDMDKVETFLRIVQCRSVEGSCGF

SEQ ID NO: 866 - protein, 191 aa, Homo sapiens
FPTIPLSRLFDNAMLRAHRLHQLAFDTYQEFEEAYIPKEQKYSFLQNPQTSLCFSESIPTPSNREETQQKSNLELLRISLLLIQSWLEPVQILRSVFANSLVYGASDSNVYDLLKDLEEGIQTLMGRLEDGSPRTGQIFKQTYSKFDTNSHNDDALLKNYGLLYCFRKDMDKVETFLRIVQCRSVEGSCGF

SEQ ID NO: 867 - protein, 191 aa, Homo sapiens
FPTIPLSRLFDNAMLRAHRLHQLAFDTYQEFEEAYIPKEQKYSFLQNPQTSLCFSESIPTPSNREETQQKSNLELLRISLLLIQSWLEPVQVLRSVFANSLVYGASDSNVYDLLKDLEEGIQTLMGRLEDGSPRTGQIFKQTYSKFDTNSHNDDALLKNYGLLYCFRKDMDKVETFLRIVQCRSVEGSCGF

SEQ ID NO: 868 - protein, 191 aa, Homo sapiens
FPTIPLSRLFDNAMLRAHRLHQLAFDTYQEFEEAYIPKEQKYSFLQNPQTSLCFSESIPTPSNREETQQKSNLELLRISLLLIQSWLEPVQFLHSVFANSLVYGASDSNVYDLLKDLEEGIQTLMGRLEDGSPRTGQIFKQTYSKFDTNSHNDDALLKNYGLLYCFRKDMDKVETFLRIVQCRSVEGSCGF

SEQ ID NO: 869 - protein, 191 aa, Homo sapiens
FPTIPLSRLFDNAMLRAHRLHQLAFDTYQEFEEAYIPKEQKYSFLQNPQTSLCFSESIPTPSNREETQQKSNLELLRISLLLIQSWLEPVQFLQSVFANSLVYGASDSNVYDLLKDLEEGIQTLMGRLEDGSPRTGQIFKQTYSKFDTNSHNDDALLKNYGLLYCFRKDMDKVETFLRIVQCRSVEGSCGF

SEQ ID NO: 870 - protein, 191 aa, Homo sapiens
FPTIPLSRLFDNAMLRAHRLHQLAFDTYQEFEEAYIPKEQKYSFLQNPQTSLCFSESIPTPSNREETQQKSNLELLRISLLLIQSWLEPVQFLRSVFANSVVYGASDSNVYDLLKDLEEGIQTLMGRLEDGSPRTGQIFKQTYSKFDTNSHNDDALLKNYGLLYCFRKDMDKVETFLRIVQCRSVEGSCGF

SEQ ID NO: 871 - protein, 191 aa, Homo sapiens
FPTIPLSRLFDNAMLRAHRLHQLAFDTYQEFEEAYIPKEQKYSFLQNPQTSLCFSESIPTPSNREETQQKSNLELLRISLLLIQSWLEPVQFLRSVFANSIVYGASDSNVYDLLKDLEEGIQTLMGRLEDGSPRTGQIFKQTYSKFDTNSHNDDALLKNYGLLYCFRKDMDKVETFLRIVQCRSVEGSCGF

SEQ ID NO: 872 - protein, 191 aa, Homo sapiens
FPTIPLSRLFDNAMLRAHRLHQLAFDTYQEFEEAYIPKEQKYSFLQNPQTSLCFSESIPTPSNREETQQKSNLELLRISLLLIQSWLEPVQFLRSVFANSLVYGASDSNVYDLLKDLEEGIQTLMGRLQDGSPRTGQIFKQTYSKFDTNSHNDDALLKNYGLLYCFRKDMDKVETFLRIVQCRSVEGSCGF

SEQ ID NO: 873 - protein, 191 aa, Homo sapiens
FPTIPLSRLFDNAMLRAHRLHQLAFDTYQEFEEAYIPKEQKYSFLQNPQTSLCFSESIPTPSNREETQQKSNLELLRISLLLIQSWLEPVQFLRSVFANSLVYGASDSNVYDLLKDLEEGIQTLMGRLNDGSPRTGQIFKQTYSKFDTNSHNDDALLKNYGLLYCFRKDMDKVETFLRIVQCRSVEGSCGF

SEQ ID NO: 874 - protein, 191 aa, Homo sapiens
FPTIPLSRLFDNAMLRAHRLHQLAFDTYQEFEEAYIPKEQKYSFLQNPQTSLCFSESIPTPSNREETQQKSNLELLRISLLLIQSWLEPVQFLRSVFANSLVYGASDSNVYDLLKDLEEGIQTLMGRLHDGSPRTGQIFKQTYSKFDTNSHNDDALLKNYGLLYCFRKDMDKVETFLRIVQCRSVEGSCGF

SEQ ID NO: 875 - protein, 191 aa, Homo sapiens
FPTIPLSRLFDNAMLRAHRLHQLAFDTYQEFEEAYIPKEQKYSFLQNPQTSLCFSESIPTPSNREETQQKSNLELLRISLLLIQSWLEPVQFLRSVFANSLVYGASDSNVYDLLKDLEEGIQTLMGRLEQGSPRTGQIFKQTYSKFDTNSHNDDALLKNYGLLYCFRKDMDKVETFLRIVQCRSVEGSCGF

SEQ ID NO: 876 - protein, 191 aa, Homo sapiens
FPTIPLSRLFDNAMLRAHRLHQLAFDTYQEFEEAYIPKEQKYSFLQNPQTSLCFSESIPTPSNREETQQKSNLELLRISLLLIQSWLEPVQFLRSVFANSLVYGASDSNVYDLLKDLEEGIQTLMGRLENGSPRTGQIFKQTYSKFDTNSHNDDALLKNYGLLYCFRKDMDKVETFLRIVQCRSVEGSCGF

SEQ ID NO: 877 - protein, 191 aa, Homo sapiens
FPTIPLSRLFDNAMLRAHRLHQLAFDTYQEFEEAYIPKEQKYSFLQNPQTSLCFSESIPTPSNREETQQKSNLELLRISLLLIQSWLEPVQFLRSVFANSLVYGASDSNVYDLLKDLEEGIQTLMGRLEDGSSRTGQIFKQTYSKFDTNSHNDDALLKNYGLLYCFRKDMDKVETFLRIVQCRSVEGSCGF

SEQ ID NO: 878 - protein, 191 aa, Homo sapiens
FPTIPLSRLFDNAMLRAHRLHQLAFDTYQEFEEAYIPKEQKYSFLQNPQTSLCFSESIPTPSNREETQQKSNLELLRISLLLIQSWLEPVQFLRSVFANSLVYGASDSNVYDLLKDLEEGIQTLMGRLEDGSARTGQIFKQTYSKFDTNSHNDDALLKNYGLLYCFRKDMDKVETFLRIVQCRSVEGSCGF

SEQ ID NO: 879 - protein, 191 aa, Homo sapiens
FPTIPLSRLFDNAMLRAHRLHQLAFDTYQEFEEAYIPKEQKYSFLQNPQTSLCFSESIPTPSNREETQQKSNLELLRISLLLIQSWLEPVQFLRSVFANSLVYGASDSNVYDLLKDLEEGIQTLMGRLEDGSPHTGQIFKQTYSKFDTNSHNDDALLKNYGLLYCFRKDMDKVETFLRIVQCRSVEGSCGF

SEQ ID NO: 880 - protein, 191 aa, Homo sapiens
FPTIPLSRLFDNAMLRAHRLHQLAFDTYQEFEEAYIPKEQKYSFLQNPQTSLCFSESIPTPSNREETQQKSNLELLRISLLLIQSWLEPVQFLRSVFANSLVYGASDSNVYDLLKDLEEGIQTLMGRLEDGSPQTGQIFKQTYSKFDTNSHNDDALLKNYGLLYCFRKDMDKVETFLRIVQCRSVEGSCGF

SEQ ID NO: 881 - protein, 191 aa, Homo sapiens
FPTIPLSRLFDNAMLRAHRLHQLAFDTYQEFEEAYIPKEQKYSFLQNPQTSLCFSESIPTPSNREETQQKSNLELLRISLLLIQSWLEPVQFLRSVFANSLVYGASDSNVYDLLKDLEEGIQTLMGRLEDGSPRTGQIFQQTYSKFDTNSHNDDALLKNYGLLYCFRKDMDKVETFLRIVQCRSVEGSCGF

SEQ ID NO: 882 - protein, 191 aa, Homo sapiens
FPTIPLSRLFDNAMLRAHRLHQLAFDTYQEFEEAYIPKEQKYSFLQNPQTSLCFSESIPTPSNREETQQKSNLELLRISLLLIQSWLEPVQFLRSVFANSLVYGASDSNVYDLLKDLEEGIQTLMGRLEDGSPRTGQIFNQTYSKFDTNSHNDDALLKNYGLLYCFRKDMDKVETFLRIVQCRSVEGSCGF

SEQ ID NO: 883 - protein, 191 aa, Homo sapiens
FPTIPLSRLFDNAMLRAHRLHQLAFDTYQEFEEAYIPKEQKYSFLQNPQTSLCFSESIPTPSNREETQQKSNLELLRISLLLIQSWLEPVQFLRSVFANSLVYGASDSNVYDLLKDLEEGIQTLMGRLEDGSPRTGQIFKQTHSKFDTNSHNDDALLKNYGLLYCFRKDMDKVETFLRIVQCRSVEGSCGF

SEQ ID NO: 884 - protein, 191 aa, Homo sapiens
FPTIPLSRLFDNAMLRAHRLHQLAFDTYQEFEEAYIPKEQKYSFLQNPQTSLCFSESIPTPSNREETQQKSNLELLRISLLLIQSWLEPVQFLRSVFANSLVYGASDSNVYDLLKDLEEGIQTLMGRLEDGSPRTGQIFKQTISKFDTNSHNDDALLKNYGLLYCFRKDMDKVETFLRIVQCRSVEGSCGF

SEQ ID NO: 885 - protein, 191 aa, Homo sapiens
FPTIPLSRLFDNAMLRAHRLHQLAFDTYQEFEEAYIPKEQKYSFLQNPQTSLCFSESIPTPSNREETQQKSNLELLRISLLLIQSWLEPVQFLRSVFANSLVYGASDSNVYDLLKDLEEGIQTLMGRLEDGSPRTGQIFKQTYSQFDTNSHNDDALLKNYGLLYCFRKDMDKVETFLRIVQCRSVEGSCGF

SEQ ID NO: 886 - protein, 191 aa, Homo sapiens
FPTIPLSRLFDNAMLRAHRLHQLAFDTYQEFEEAYIPKEQKYSFLQNPQTSLCFSESIPTPSNREETQQKSNLELLRISLLLIQSWLEPVQFLRSVFANSLVYGASDSNVYDLLKDLEEGIQTLMGRLEDGSPRTGQIFKQTYSNFDTNSHNDDALLKNYGLLYCFRKDMDKVETFLRIVQCRSVEGSCGF

SEQ ID NO: 887 - protein, 191 aa, Homo sapiens
FPTIPLSRLFDNAMLRAHRLHQLAFDTYQEFEEAYIPKEQKYSFLQNPQTSLCFSESIPTPSNREETQQKSNLELLRISLLLIQSWLEPVQFLRSVFANSLVYGASDSNVYDLLKDLEEGIQTLMGRLEDGSPRTGQIFKQTYSKIDTNSHNDDALLKNYGLLYCFRKDMDKVETFLRIVQCRSVEGSCGF

SEQ ID NO: 888 - protein, 191 aa, Homo sapiens
FPTIPLSRLFDNAMLRAHRLHQLAFDTYQEFEEAYIPKEQKYSFLQNPQTSLCFSESIPTPSNREETQQKSNLELLRISLLLIQSWLEPVQFLRSVFANSLVYGASDSNVYDLLKDLEEGIQTLMGRLEDGSPRTGQIFKQTYSKVDTNSHNDDALLKNYGLLYCFRKDMDKVETFLRIVQCRSVEGSCGF

SEQ ID NO: 889 - protein, 191 aa, Homo sapiens
FPTIPLSRLFDNAMLRAHRLHQLAFDTYQEFEEAYIPKEQKYSFLQNPQTSLCFSESIPTPSNREETQQKSNLELLRISLLLIQSWLEPVQFLRSVFANSLVYGASDSNVYDLLKDLEEGIQTLMGRLEDGSPRTGQIFKQTYSKFQTNSHNDDALLKNYGLLYCFRKDMDKVETFLRIVQCRSVEGSCGF

SEQ ID NO: 890 - protein, 191 aa, Homo sapiens
FPTIPLSRLFDNAMLRAHRLHQLAFDTYQEFEEAYIPKEQKYSFLQNPQTSLCFSESIPTPSNREETQQKSNLELLRISLLLIQSWLEPVQFLRSVFANSLVYGASDSNVYDLLKDLEEGIQTLMGRLEDGSPRTGQIFKQTYSKFNTNSHNDDALLKNYGLLYCFRKDMDKVETFLRIVQCRSVEGSCGF

SEQ ID NO: 891 - protein, 191 aa, Homo sapiens
FPTIPLSRLFDNAMLRAHRLHQLAFDTYQEFEEAYIPKEQKYSFLQNPQTSLCFSESIPTPSNREETQQKSNLELLRISLLLIQSWLEPVQFLRSVFANSLVYGASDSNVYDLLKDLEEGIQTLMGRLEDGSPRTGQIFKQTYSKFDTNSHNDDALLKNYGLLYCFRKDMDKVETFLRIVQCHSVEGSCGF

SEQ ID NO: 892 - protein, 191 aa, Homo sapiens
FPTIPLSRLFDNAMLRAHRLHQLAFDTYQEFEEAYIPKEQKYSFLQNPQTSLCFSESIPTPSNREETQQKSNLELLRISLLLIQSWLEPVQFLRSVFANSLVYGASDSNVYDLLKDLEEGIQTLMGRLEDGSPRTGQIFKQTYSKFDTNSHNDDALLKNYGLLYCFRKDMDKVETFLRIVQCQSVEGSCGF

SEQ ID NO: 893 - protein, 191 aa, Homo sapiens
FPTIPLSRLFDNAMLRAHRLHQLAFDTYQEFEEAYIPKEQKYSFLQNPQTSLCFSESIPTPSNREETQQKSNLELLRISLLLIQSWLEPVQFLRSVFANSLVYGASDSNVYDLLKDLEEGIQTLMGRLEDGSPRTGQIFKQTYSKFDTNSHNDDALLKNYGLLYCFRKDMDKVETFLRIVQCRSVQGSCGF

SEQ ID NO: 894 - protein, 191 aa, Homo sapiens
FPTIPLSRLFDNAMLRAHRLHQLAFDTYQEFEEAYIPKEQKYSFLQNPQTSLCFSESIPTPSNREETQQKSNLELLRISLLLIQSWLEPVQFLRSVFANSLVYGASDSNVYDLLKDLEEGIQTLMGRLEDGSPRTGQIFKQTYSKFDTNSHNDDALLKNYGLLYCFRKDMDKVETFLRIVQCRSVNGSCGF

SEQ ID NO: 895 - protein, 191 aa, Homo sapiens
FPTIPLSRLFDNAMLRAHRLHQLAFDTYQEFEEAYIPKEQKYSFLQNPQTSLCFSESIPTPSNREETQQKSNLELLRISLLLIQSWLEPVQFLRSVFANSLVYGASDSNVYDLLKDLEEGIQTLMGRLEDGSPRTGQIFKQTYSKFDTNSHNDDALLKNYGLLYCFRKDMDKVETFLRIVQCRSVHGSCGF

SEQ ID NO: 896-939 - skipped (44 entries)

SEQ ID NO: 940 - protein, 166 aa, Homo sapiens
APPRLICDSRVLERYLLEAKEAENITTGCAEHCSLNENITVPQTKVNFYAWKRMEVGQQAVEVWQGLALLSEAVLRGQALLVNSSQPWEPLQLHVDKAVSGLRSLTTLLRALGAQKEAISPPDAASAAPLRTITADTFRKLFRVYSNFLRGKLKLYTGEACRTGDR

SEQ ID NO: 941 - protein, 166 aa, Homo sapiens
APPRLICDSRVLERYLLEAKEAENITTGCAEHCSLNENITVPNTKVNFYAWKRMEVGQQAVEVWQGLALLSEAVLRGQALLVNSSQPWEPLQLHVDKAVSGLRSLTTLLRALGAQKEAISPPDAASAAPLRTITADTFRKLFRVYSNFLRGKLKLYTGEACRTGDR

SEQ ID NO: 942 - protein, 166 aa, Homo sapiens
APPRLICDSRVLERYLLEAKEAENITTGCAEHCSLNENITVPDTQVNFYAWKRMEVGQQAVEVWQGLALLSEAVLRGQALLVNSSQPWEPLQLHVDKAVSGLRSLTTLLRALGAQKEAISPPDAASAAPLRTITADTFRKLFRVYSNFLRGKLKLYTGEACRTGDR

SEQ ID NO: 943 - protein, 166 aa, Homo sapiens
APPRLICDSRVLERYLLEAKEAENITTGCAEHCSLNENITVPDTNVNFYAWKRMEVGQQAVEVWQGLALLSEAVLRGQALLVNSSQPWEPLQLHVDKAVSGLRSLTTLLRALGAQKEAISPPDAASAAPLRTITADTFRKLFRVYSNFLRGKLKLYTGEACRTGDR

SEQ ID NO: 944 - protein, 166 aa, Homo sapiens
APPRLICDSRVLERYLLEAKEAENITTGCAEHCSLNENITVPDTKVNIYAWKRMEVGQQAVEVWQGLALLSEAVLRGQALLVNSSQPWEPLQLHVDKAVSGLRSLTTLLRALGAQKEAISPPDAASAAPLRTITADTFRKLFRVYSNFLRGKLKLYTGEACRTGDR

SEQ ID NO: 945 - protein, 166 aa, Homo sapiens
APPRLICDSRVLERYLLEAKEAENITTGCAEHCSLNENITVPDTKVNVYAWKRMEVGQQAVEVWQGLALLSEAVLRGQALLVNSSQPWEPLQLHVDKAVSGLRSLTTLLRALGAQKEAISPPDAASAAPLRTITADTFRKLFRVYSNFLRGKLKLYTGEACRTGDR

SEQ ID NO: 946 - protein, 166 aa, Homo sapiens
APPRLICDSRVLERYLLEAKEAENITTGCAEHCSLNENITVPDTKVNFHAWKRMEVGQQAVEVWQGLALLSEAVLRGQALLVNSSQPWEPLQLHVDKAVSGLRSLTTLLRALGAQKEAISPPDAASAAPLRTITADTFRKLFRVYSNFLRGKLKLYTGEACRTGDR

SEQ ID NO: 947 - protein, 166 aa, Homo sapiens
APPRLICDSRVLERYLLEAKEAENITTGCAEHCSLNENITVPDTKVNFIAWKRMEVGQQAVEVWQGLALLSEAVLRGQALLVNSSQPWEPLQLHVDKAVSGLRSLTTLLRALGAQKEAISPPDAASAAPLRTITADTFRKLFRVYSNFLRGKLKLYTGEACRTGDR

SEQ ID NO: 948 - protein, 166 aa, Homo sapiens
APPRLICDSRVLERYLLEAKEAENITTGCAEHCSLNENITVPDTKVNFYAWQRMEVGQQAVEVWQGLALLSEAVLRGQALLVNSSQPWEPLQLHVDKAVSGLRSLTTLLRALGAQKEAISPPDAASAAPLRTITADTFRKLFRVYSNFLRGKLKLYTGEACRTGDR

SEQ ID NO: 949 - protein, 166 aa, Homo sapiens
APPRLICDSRVLERYLLEAKEAENITTGCAEHCSLNENITVPDTKVNFYAWNRMEVGQQAVEVWQGLALLSEAVLRGQALLVNSSQPWEPLQLHVDKAVSGLRSLTTLLRALGAQKEAISPPDAASAAPLRTITADTFRKLFRVYSNFLRGKLKLYTGEACRTGDR

SEQ ID NO: 950 - protein, 166 aa, Homo sapiens
APPRLICDSRVLERYLLEAKEAENITTGCAEHCSLNENITVPDTKVNFYAWKHMEVGQQAVEVWQGLALLSEAVLRGQALLVNSSQPWEPLQLHVDKAVSGLRSLTTLLRALGAQKEAISPPDAASAAPLRTITADTFRKLFRVYSNFLRGKLKLYTGEACRTGDR

SEQ ID NO: 951 - protein, 166 aa, Homo sapiens
APPRLICDSRVLERYLLEAKEAENITTGCAEHCSLNENITVPDTKVNFYAWKQMEVGQQAVEVWQGLALLSEAVLRGQALLVNSSQPWEPLQLHVDKAVSGLRSLTTLLRALGAQKEAISPPDAASAAPLRTITADTFRKLFRVYSNFLRGKLKLYTGEACRTGDR

SEQ ID NO: 952 - protein, 166 aa, Homo sapiens
APPRLICDSRVLERYLLEAKEAENITTGCAEHCSLNENITVPDTKVNFYAWKRMQVGQQAVEVWQGLALLSEAVLRGQALLVNSSQPWEPLQLHVDKAVSGLRSLTTLLRALGAQKEAISPPDAASAAPLRTITADTFRKLFRVYSNFLRGKLKLYTGEACRTGDR

SEQ ID NO: 953 - protein, 166 aa, Homo sapiens
APPRLICDSRVLERYLLEAKEAENITTGCAEHCSLNENITVPDTKVNFYAWKRMNVGQQAVEVWQGLALLSEAVLRGQALLVNSSQPWEPLQLHVDKAVSGLRSLTTLLRALGAQKEAISPPDAASAAPLRTITADTFRKLFRVYSNFLRGKLKLYTGEACRTGDR

SEQ ID NO: 954 - protein, 166 aa, Homo sapiens
APPRLICDSRVLERYLLEAKEAENITTGCAEHCSLNENITVPDTKVNFYAWKRMHVGQQAVEVWQGLALLSEAVLRGQALLVNSSQPWEPLQLHVDKAVSGLRSLTTLLRALGAQKEAISPPDAASAAPLRTITADTFRKLFRVYSNFLRGKLKLYTGEACRTGDR

SEQ ID NO: 955 - protein, 166 aa, Homo sapiens
APPRLICDSRVLERYLLEAKEAENITTGCAEHCSLNENITVPDTKVNFYAWKRMEVGQQAVEVWQGLALLSQAVLRGQALLVNSSQPWEPLQLHVDKAVSGLRSLTTLLRALGAQKEAISPPDAASAAPLRTITADTFRKLFRVYSNFLRGKLKLYTGEACRTGDR

SEQ ID NO: 956 - protein, 166 aa, Homo sapiens
APPRLICDSRVLERYLLEAKEAENITTGCAEHCSLNENITVPDTKVNFYAWKRMEVGQQAVEVWQGLALLSNAVLRGQALLVNSSQPWEPLQLHVDKAVSGLRSLTTLLRALGAQKEAISPPDAASAAPLRTITADTFRKLFRVYSNFLRGKLKLYTGEACRTGDR

SEQ ID NO: 957 - protein, 166 aa, Homo sapiens
APPRLICDSRVLERYLLEAKEAENITTGCAEHCSLNENITVPDTKVNFYAWKRMEVGQQAVEVWQGLALLSHAVLRGQALLVNSSQPWEPLQLHVDKAVSGLRSLTTLLRALGAQKEAISPPDAASAAPLRTITADTFRKLFRVYSNFLRGKLKLYTGEACRTGDR

SEQ ID NO: 958 - protein, 166 aa, Homo sapiens
APPRLICDSRVLERYLLEAKEAENITTGCAEHCSLNENITVPDTKVNFYAWKRMEVGQQAVEVWQGLALLSEAVVRGQALLVNSSQPWEPLQLHVDKAVSGLRSLTTLLRALGAQKEAISPPDAASAAPLRTITADTFRKLFRVYSNFLRGKLKLYTGEACRTGDR

SEQ ID NO: 959 - protein, 166 aa, Homo sapiens
APPRLICDSRVLERYLLEAKEAENITTGCAEHCSLNENITVPDTKVNFYAWKRMEVGQQAVEVWQGLALLSEAVIRGQALLVNSSQPWEPLQLHVDKAVSGLRSLTTLLRALGAQKEAISPPDAASAAPLRTITADTFRKLFRVYSNFLRGKLKLYTGEACRTGDR

SEQ ID NO: 960 - protein, 166 aa, Homo sapiens
APPRLICDSRVLERYLLEAKEAENITTGCAEHCSLNENITVPDTKVNFYAWKRMEVGQQAVEVWQGLALLSEAVLHGQALLVNSSQPWEPLQLHVDKAVSGLRSLTTLLRALGAQKEAISPPDAASAAPLRTITADTFRKLFRVYSNFLRGKLKLYTGEACRTGDR

SEQ ID NO: 961 - protein, 166 aa, Homo sapiens
APPRLICDSRVLERYLLEAKEAENITTGCAEHCSLNENITVPDTKVNFYAWKRMEVGQQAVEVWQGLALLSEAVLQGQALLVNSSQPWEPLQLHVDKAVSGLRSLTTLLRALGAQKEAISPPDAASAAPLRTITADTFRKLFRVYSNFLRGKLKLYTGEACRTGDR

SEQ ID NO: 962 - protein, 166 aa, Homo sapiens
APPRLICDSRVLERYLLEAKEAENITTGCAEHCSLNENITVPDTKVNFYAWKRMEVGQQAVEVWQGLALLSEAVLRGQALLVNSSQPWEPLQLHVDKAVSGLRSLTTLLRALGAQKEAISPPQAASAAPLRTITADTFRKLFRVYSNFLRGKLKLYTGEACRTGDR

SEQ ID NO: 963 - protein, 166 aa, Homo sapiens
APPRLICDSRVLERYLLEAKEAENITTGCAEHCSLNENITVPDTKVNFYAWKRMEVGQQAVEVWQGLALLSEAVLRGQALLVNSSQPWEPLQLHVDKAVSGLRSLTTLLRALGAQKEAISPPNAASAAPLRTITADTFRKLFRVYSNFLRGKLKLYTGEACRTGDR

SEQ ID NO: 964 - protein, 166 aa, Homo sapiens
APPRLICDSRVLERYLLEAKEAENITTGCAEHCSLNENITVPDTKVNFYAWKRMEVGQQAVEVWQGLALLSEAVLRGQALLVNSSQPWEPLQLHVDKAVSGLRSLTTLLRALGAQKEAISPPDAASAASLRTITADTFRKLFRVYSNFLRGKLKLYTGEACRTGDR

SEQ ID NO: 965 - protein, 166 aa, Homo sapiens
APPRLICDSRVLERYLLEAKEAENITTGCAEHCSLNENITVPDTKVNFYAWKRMEVGQQAVEVWQGLALLSEAVLRGQALLVNSSQPWEPLQLHVDKAVSGLRSLTTLLRALGAQKEAISPPDAASAAALRTITADTFRKLFRVYSNFLRGKLKLYTGEACRTGDR

SEQ ID NO: 966 - protein, 166 aa, Homo sapiens
APPRLICDSRVLERYLLEAKEAENITTGCAEHCSLNENITVPDTKVNFYAWKRMEVGQQAVEVWQGLALLSEAVLRGQALLVNSSQPWEPLQLHVDKAVSGLRSLTTLLRALGAQKEAISPPDAASAAPVRTITADTFRKLFRVYSNFLRGKLKLYTGEACRTGDR

SEQ ID NO: 967 - protein, 166 aa, Homo sapiens
APPRLICDSRVLERYLLEAKEAENITTGCAEHCSLNENITVPDTKVNFYAWKRMEVGQQAVEVWQGLALLSEAVLRGQALLVNSSQPWEPLQLHVDKAVSGLRSLTTLLRALGAQKEAISPPDAASAAPIRTITADTFRKLFRVYSNFLRGKLKLYTGEACRTGDR

SEQ ID NO: 968 - protein, 166 aa, Homo sapiens
APPRLICDSRVLERYLLEAKEAENITTGCAEHCSLNENITVPDTKVNFYAWKRMEVGQQAVEVWQGLALLSEAVLRGQALLVNSSQPWEPLQLHVDKAVSGLRSLTTLLRALGAQKEAISPPDAASAAPLHTITADTFRKLFRVYSNFLRGKLKLYTGEACRTGDR

SEQ ID NO: 969 - protein, 166 aa, Homo sapiens
APPRLICDSRVLERYLLEAKEAENITTGCAEHCSLNENITVPDTKVNFYAWKRMEVGQQAVEVWQGLALLSEAVLRGQALLVNSSQPWEPLQLHVDKAVSGLRSLTTLLRALGAQKEAISPPDAASAAPLQTITADTFRKLFRVYSNFLRGKLKLYTGEACRTGDR

SEQ ID NO: 970 - protein, 166 aa, Homo sapiens
APPRLICDSRVLERYLLEAKEAENITTGCAEHCSLNENITVPDTKVNFYAWKRMEVGQQAVEVWQGLALLSEAVLRGQALLVNSSQPWEPLQLHVDKAVSGLRSLTTLLRALGAQKEAISPPDAASAAPLRTITADTFRKLFRVYSNFLRGKLKLYTGEACHTGDR

SEQ ID NO: 971 - protein, 166 aa, Homo sapiens
APPRLICDSRVLERYLLEAKEAENITTGCAEHCSLNENITVPDTKVNFYAWKRMEVGQQAVEVWQGLALLSEAVLRGQALLVNSSQPWEPLQLHVDKAVSGLRSLTTLLRALGAQKEAISPPDAASAAPLRTITADTFRKLFRVYSNFLRGKLKLYTGEACQTGDR

SEQ ID NO: 972 - protein, 166 aa, Homo sapiens
APPRLICDSRVLERYLLEAKEAENITTGCAEHCSLNENITVPDTKVNFYAWKRMEVGQQAVEVWQGLALLSEAVLRGQALLVNSSQPWEPLQLHVDKAVSGLRSLTTLLRALGAQKEAISPPDAASAAPLRTITADTFRKLFRVYSNFLRGKLKLYTGEACRTGQR

SEQ ID NO: 973 - protein, 166 aa, Homo sapiens
APPRLICDSRVLERYLLEAKEAENITTGCAEHCSLNENITVPDTKVNFYAWKRMEVGQQAVEVWQGLALLSEAVLRGQALLVNSSQPWEPLQLHVDKAVSGLRSLTTLLRALGAQKEAISPPDAASAAPLRTITADTFRKLFRVYSNFLRGKLKLYTGEACRTGNR

SEQ ID NO: 974 - protein, 166 aa, Homo sapiens
APPRLICDSRVLERYLLEAKEAENITTGCAEHCSLNENITVPDTKVNFYAWKRMEVGQQAVEVWQGLALLSEAVLRGQALLVNSSQPWEPLQLHVDKAVSGLRSLTTLLRALGAQKEAISSPDAASAAPLRTITADTFRKLFRVYSNFLRGKLKLYTGEACHTGDR

SEQ ID NO: 975 - protein, 166 aa, Homo sapiens
APPRLICDSRVLERYLLEAKEAENITTGCAEHCSLNENITVPDTKVNFYAWKRMEVGQQAVEVWQGLALLSEAVLRGQALLVNSSQPWEPLQLHVDKAVSGLRSLTTLLRALGAQKEAISAPDAASAAPLRTITADTFRKLFRVYSNFLRGKLKLYTGEACQTGDR

SEQ ID NO: 976 - protein, 166 aa, Homo sapiens
APPRLICDSRVLERYLLEAKEAENITTGCAEHCSLNENITVPDTKVNFYAWKRMEVGQQAVEVWQGLALLSEAVLRGQALLVNSSQPWEPLQLHVDKAVSGLRSLTTLLRALGAQKEAISPSDAASAAPLRTITADTFRKLFRVYSNFLRGKLKLYTGEACRTGQR

SEQ ID NO: 977 - protein, 166 aa, Homo sapiens
APPRLICDSRVLERYLLEAKEAENITTGCAEHCSLNENITVPDTKVNFYAWKRMEVGQQAVEVWQGLALLSEAVLRGQALLVNSSQPWEPLQLHVDKAVSGLRSLTTLLRALGAQKEAISPADAASAAPLRTITADTFRKLFRVYSNFLRGKLKLYTGEACRTGNR

SEQ ID NO: 978 - protein, 165 aa, Homo sapiens
CDLPQTHSLGSRRTLMLLAQMRRISLFSCLKDRHDFGFPQEEFGNQFQKAETIPVLHEMIQQIFNLFSTKDSSAAWDETLLDKFYTELYQQLNDLEACVIQGVGVTETPLVKEDSILAVRKYFQRITLYLKEKKYSPCAWEVVRAEIMRSFSLSTNLPESLRSKE

SEQ ID NO: 979 - protein, 165 aa, Homo sapiens
CDLPQTHSLGSRRTLMLLAQMRRISLFSCLKDRHDFGFPQHEFGDQFQKAETIPVLHEMIQQIFNLFSTKDSSAAWDETLLDKFYTELHQQLNDLEACVIQGVGVTETPLMKEDSILAVRKYFQRITLYLKEKKYSPCAWEVVRAEIMRSFSLSTNLQESLRSKE

SEQ ID NO: 980 - protein, 165 aa, Homo sapiens
CDLPQTHSLGSRRTLMLLAQMRRISLFSCLKDRHDFGFPQQEFGNQFQKAETIPVLHEMIQQIFNLFSTKDSSAAWDETLLDKFYTELYQQLNGLEACVIQGVGVTETPLMKEDSILAVRKYFQRITLYLKEKKYSPCAWEVVRAEIMRSFSLSTNLQESLRSKE

SEQ ID NO: 981 - protein, 165 aa, Homo sapiens
CDLPQTHSLGSRRTLMLLAQMRRISLVSCLKDRHDFGFPQEEFGNQFQKAETIPVLHQMIQQIFNLFSTKDSSAAWDETLLDKFYTELYQQLNDLEACVIQGVGVTETPLMKEDSILAVRKYFQRITLYLKEKKYSPCAWEVVRAEIMRSFSLSTNLQESLRSKE

SEQ ID NO: 982 - protein, 165 aa, Homo sapiens
CDLPQTHSLGSRRTLMLLAQMRRISLFSCLKDHHDFGFPQEEFGNQFQKAETIPVLHHMIQQIFNLFSTKDSSAAWDHTLLDKFYTELYQQLNDLEACVIQGVGVTETPVMKEDSILAVRKYFQRITLYLKEKKYSPCAWEVVRAEIMRSFSLSTNLQESLRSKE

SEQ ID NO: 983 - protein, 165 aa, Homo sapiens
CDLPQTHSLGSRRTLMLLAQMRRISLFSCLKDRHDFGFPQEEFGNQFQKAETIPVLHEMIQQIFNLFSTKDSSAAWDETLLDKFYTELYQQLNDLEACVIQGVGVTETALMKEDSILAVRQYFQRITLYLKEKKYSPCAWEVVRAEIMRSFSLSTNLQESLRSKE

SEQ ID NO: 984 - protein, 165 aa, Homo sapiens
CDLPQTHSLGSRRTLMLLAQMRRISLFSCLKDRHDFGFPQEEFGNQFQKAETIPVLHEMIQQIFNLFSTKDSSAAWDETLLDKFYTELYQQLNDLEACVIQRVGVTETALMKEDSILAVRQYFQRITLYLKEQKYSPCAWEVVRAEIMRSFSLSTNLQESLRSKE

SEQ ID NO: 985 - protein, 165 aa, Homo sapiens
CDLPQTHSLGSRRTLMLLAQMRRISLFSCLKDRHDFGFPQEEFGNQFQKAETIPVLHEMIQQIFNLFSTKDSSAAWDETLLDKFYTELYQQLNDLEACVIQGVGVTETPLMKEDSIVAVRKYFQRITLYLKEKKYSPCGWEVVRAEIMRSFSLSTNLQESLRSKE

SEQ ID NO: 986 - protein, 165 aa, Homo sapiens
CDLPQTHSLGSRRTLMLLAQMRRISLFSCLKDRHDFGFPQEEFGNQFQKAETIPVLHEMIQQIFNLFSTKDSSAAWDETLLDKFYTELYQQLNDLEACVIQGVGVTETPLVKEDSILAVRKYFQHITLYLKEKKYSPCAWEVVRAEIMRSFSLSTNLPESLRSKE

SEQ ID NO: 987 - protein, 165 aa, Homo sapiens
CDLPQTHSLGSRRTLMLLAQMRRISLFSCLKDRHDFGFPQEEFGNQFQKAETIPVLHEMIQQIFNLFSTKDSSAAWDETLLDKFYTELHQQLNDLEACVIQGVGVTETPLMKEDSILAVRKYFQRITLYLKEKKYSPCAWEVVRAEIMRSFSLSTNLQHSLRSKE

SEQ ID NO: 988 - protein, 165 aa, Homo sapiens
CDLPQTHSLGSRRTLMLLAQMRRISLFSCLKDRHDFGFPQEEFGNQFQKAETIPVLHEMIQQIFNLFSTKDSSAAWDETLLDKFYTELYQQLNDLEACVIAGVGVTETPLMKEDSILAVRKYFQRITLYLKEKKYSPCAWEVVRAEIMRSFSLSTNLQESLRSKE

SEQ ID NO: 989 - protein, 166 aa, Homo sapiens
MSYNLLGFLQRSSNFQCQKLLWQLNGRLEYCLKDRMNFDIPEEIKQLQQFQKEDAALTIYEMLQNIFAIFRQDSSSTGWNETIVENLLANVYHQINHLKTVLEEKLEKEDFTRGKLMSSLHLTRYYGRILHYLKAKEYSHCAWTIVRVEILRNFYFINRLTGYLRN

SEQ ID NO: 990 - protein, 166 aa, Homo sapiens
MSYNLLGFLQRSSNFQCQKLLWQLNGRLEYCLKDRMNFDIPEEIKQLQQFQKEDAALTIYEMLQNIFAIFRQDSSSTGWNETIVENLLANVYHQINHLKTVLEEKLEKEDFTRGKLMSSLHLSRYYGRILHYLKAKEYSHCAWTIVRVEILRNFYFINRLTGYLRN

SEQ ID NO: 991 - protein, 166 aa, Homo sapiens
MSYNLLGFLQRSSNFQCQKLLWQLNGRLEYCLKDRMNFDIPEEIKQLQQFQKEDAALTIYEMLQNIFAIFRQDSSSTGWNETIVENLLANVYHQINHLKTVLEEKLEKEDFTRGKLMSSLHLHRYYGRILHYLKAKEYSHCAWTIVRVEILRNFYFINRLTGYLRN

SEQ ID NO: 992 - protein, 166 aa, Homo sapiens
MSYNLLGFLQRSSNFQCQKLLWQLNGRLEYCLKDRMNFDIPEEIKQLQQFQKEDAALTIYEMLQNIFAIFRQDSSSTGWNETIVENLLANVYHQINHLKTVLEEKLEKEDFTRGKLMSSLHLKHYYGRILHYLKAKEYSHCAWTIVRVEILRNFYFINRLTGYLRN

SEQ ID NO: 993 - protein, 166 aa, Homo sapiens
MSYNLLGFLQRSSNFQCQKLLWQLNGRLEYCLKDRMNFDIPEEIKQLQQFQKEDAALTIYEMLQNIFAIFRQDSSSTGWNETIVENLLANVYHQINHLKTVLEEKLEKEDFTRGKLMSSLHLKQYYGRILHYLKAKEYSHCAWTIVRVEILRNFYFINRLTGYLRN

SEQ ID NO: 994 - protein, 166 aa, Homo sapiens
MSYNLLGFLQRSSNFQCQKLLWQLNGRLEYCLKDRMNFDIPEEIKQLQQFQKEDAALTIYEMLQNIFAIFRQDSSSTGWNETIVENLLANVYHQINHLKTVLEEKLEKEDFTRGKLMSSLHLKRYYGHILHYLKAKEYSHCAWTIVRVEILRNFYFINRLTGYLRN

SEQ ID NO: 995 - protein, 166 aa, Homo sapiens
MSYNLLGFLQRSSNFQCQKLLWQLNGRLEYCLKDRMNFDIPEEIKQLQQFQKEDAALTIYEMLQNIFAIFRQDSSSTGWNETIVENLLANVYHQINHLKTVLEEKLEKEDFTRGKLMSSLHLKRYYGQILHYLKAKEYSHCAWTIVRVEILRNFYFINRLTGYLRN

SEQ ID NO: 996 - protein, 166 aa, Homo sapiens
MSYNLLGFLQRSSNFQCQKLLWQLNGRLEYCLKDRMNFDIPEEIKQLQQFQKEDAALTIYEMLQNIFAIFRQDSSSTGWNETIVENLLANVYHQINHLKTVLEEKLEKEDFTRGKLMSSLHLKRYYGRIVHYLKAKEYSHCAWTIVRVEILRNFYFINRLTGYLRN

SEQ ID NO: 997 - protein, 166 aa, Homo sapiens
MSYNLLGFLQRSSNFQCQKLLWQLNGRLEYCLKDRMNFDIPEEIKQLQQFQKEDAALTIYEMLQNIFAIFRQDSSSTGWNETIVENLLANVYHQINHLKTVLEEKLEKEDFTRGKLMSSLHLKRYYGRIIHYLKAKEYSHCAWTIVRVEILRNFYFINRLTGYLRN

SEQ ID NO: 998 - protein, 166 aa, Homo sapiens
MSYNLLGFLQRSSNFQCQKLLWQLNGRLEYCLKDRMNFDIPEEIKQLQQFQKEDAALTIYEMLQNIFAIFRQDSSSTGWNETIVENLLANVYHQINHLKTVLEEKLEKEDFTRGKLMSSLHLKRYYGRITHYLKAKEYSHCAWTIVRVEILRNFYFINRLTGYLRN

SEQ ID NO: 999 - protein, 166 aa, Homo sapiens
MSYNLLGFLQRSSNFQCQKLLWQLNGRLEYCLKDRMNFDIPEEIKQLQQFQKEDAALTIYEMLQNIFAIFRQDSSSTGWNETIVENLLANVYHQINHLKTVLEEKLEKEDFTRGKLMSSLHLKRYYGRIQHYLKAKEYSHCAWTIVRVEILRNFYFINRLTGYLRN

SEQ ID NO: 1000 - protein, 166 aa, Homo sapiens
MSYNLLGFLQRSSNFQCQKLLWQLNGRLEYCLKDRMNFDIPEEIKQLQQFQKEDAALTIYEMLQNIFAIFRQDSSSTGWNETIVENLLANVYHQINHLKTVLEEKLEKEDFTRGKLMSSLHLKRYYGRIHHYLKAKEYSHCAWTIVRVEILRNFYFINRLTGYLRN

SEQ ID NO: 1001 - protein, 166 aa, Homo sapiens
MSYNLLGFLQRSSNFQCQKLLWQLNGRLEYCLKDRMNFDIPEEIKQLQQFQKEDAALTIYEMLQNIFAIFRQDSSSTGWNETIVENLLANVYHQINHLKTVLEEKLEKEDFTRGKLMSSLHLKRYYGRIAHYLKAKEYSHCAWTIVRVEILRNFYFINRLTGYLRN

SEQ ID NO: 1002 - protein, 166 aa, Homo sapiens
MSYNLLGFLQRSSNFQCQKLLWQLNGRLEYCLKDRMNFDIPEEIKQLQQFQKEDAALTIYEMLQNIFAIFRQDSSSTGWNETIVENLLANVYHQINHLKTVLEEKLEKEDFTRGKLMSSLHLKRYYGRILHYLQAKEYSHCAWTIVRVEILRNFYFINRLTGYLRN

SEQ ID NO: 1003 - protein, 166 aa, Homo sapiens
MSYNLLGFLQRSSNFQCQKLLWQLNGRLEYCLKDRMNFDIPEEIKQLQQFQKEDAALTIYEMLQNIFAIFRQDSSSTGWNETIVENLLANVYHQINHLKTVLEEKLEKEDFTRGKLMSSLHLKRYYGRILHYLTAKEYSHCAWTIVRVEILRNFYFINRLTGYLRN

SEQ ID NO: 1004 - protein, 166 aa, Homo sapiens
MSYNLLGFLQRSSNFQCQKLLWQLNGRLEYCLKDRMNFDIPEEIKQLQQFQKEDAALTIYEMLQNIFAIFRQDSSSTGWNETIVENLLANVYHQINHLKTVLEEKLEKEDFTRGKLMSSLHLKRYYGRILHYLSAKEYSHCAWTIVRVEILRNFYFINRLTGYLRN

SEQ ID NO: 1005 - protein, 166 aa, Homo sapiens
MSYNLLGFLQRSSNFQCQKLLWQLNGRLEYCLKDRMNFDIPEEIKQLQQFQKEDAALTIYEMLQNIFAIFRQDSSSTGWNETIVENLLANVYHQINHLKTVLEEKLEKEDFTRGKLMSSLHLKRYYGRILHYLHAKEYSHCAWTIVRVEILRNFYFINRLTGYLRN

SEQ ID NO: 1006 - protein, 166 aa, Homo sapiens
MSYNLLGFLQRSSNFQCQKLLWQLNGRLEYCLKDRMNFDIPEEIKQLQQFQKEDAALTIYEMLQNIFAIFRQDSSSTGWNETIVENLLANVYHQINHLKTVLEEKLEKEDFTRGKLMSSLHLKRYYGRILHYLKAQEYSHCAWTIVRVEILRNFYFINRLTGYLRN

SEQ ID NO: 1007 - protein, 166 aa, Homo sapiens
MSYNLLGFLQRSSNFQCQKLLWQLNGRLEYCLKDRMNFDIPEEIKQLQQFQKEDAALTIYEMLQNIFAIFRQDSSSTGWNETIVENLLANVYHQINHLKTVLEEKLEKEDFTRGKLMSSLHLKRYYGRILHYLKATEYSHCAWTIVRVEILRNFYFINRLTGYLRN

SEQ ID NO: 1008 - protein, 166 aa, Homo sapiens
MSYNLLGFLQRSSNFQCQKLLWQLNGRLEYCLKDRMNFDIPEEIKQLQQFQKEDAALTIYEMLQNIFAIFRQDSSSTGWNETIVENLLANVYHQINHLKTVLEEKLEKEDFTRGKLMSSLHLKRYYGRILHYLKASEYSHCAWTIVRVEILRNFYFINRLTGYLRN

SEQ ID NO: 1009 - protein, 166 aa, Homo sapiens
MSYNLLGFLQRSSNFQCQKLLWQLNGRLEYCLKDRMNFDIPEEIKQLQQFQKEDAALTIYEMLQNIFAIFRQDSSSTGWNETIVENLLANVYHQINHLKTVLEEKLEKEDFTRGKLMSSLHLKRYYGRILHYLKAHEYSHCAWTIVRVEILRNFYFINRLTGYLRN

SEQ ID NO: 1010 - protein, 166 aa, Homo sapiens
MSYNLLGFLQRSSNFQCQKLLWQLNGRLEYCLKDRMNFDIPEEIKQLQQFQKEDAALTIYEMLQNIFAIFRQDSSSTGWNETIVENLLANVYHQINHLKTVLEEKLEKEDFTRGKLMSSLHLKRYYGRILHYLKAKQYSHCAWTIVRVEILRNFYFINRLTGYLRN

SEQ ID NO: 1011 - protein, 166 aa, Homo sapiens
MSYNLLGFLQRSSNFQCQKLLWQLNGRLEYCLKDRMNFDIPEEIKQLQQFQKEDAALTIYEMLQNIFAIFRQDSSSTGWNETIVENLLANVYHQINHLKTVLEEKLEKEDFTRGKLMSSLHLKRYYGRILHYLKAKHYSHCAWTIVRVEILRNFYFINRLTGYLRN

SEQ ID NO: 1012 - protein, 166 aa, Homo sapiens
MSYNLLGFLQRSSNFQCQKLLWQLNGRLEYCLKDRMNFDIPEEIKQLQQFQKEDAALTIYEMLQNIFAIFRQDSSSTGWNETIVENLLANVYHQINHLKTVLEEKLEKEDFTRGKLMSSLHLKRYYGRILHYLKAKEYSHCAWTIVRVEILRNFYFINRLTGHLRN

SEQ ID NO: 1013 - protein, 166 aa, Homo sapiens
MSYNLLGFLQRSSNFQCQKLLWQLNGRLEYCLKDRMNFDIPEEIKQLQQFQKEDAALTIYEMLQNIFAIFRQDSSSTGWNETIVENLLANVYHQINHLKTVLEEKLEKEDFTRGKLMSSLHLKRYYGRILHYLKAKEYSHCAWTIVRVEILRNFYFINRLTGILRN

SEQ ID NO: 1014 - protein, 166 aa, Homo sapiens
MSYNLLGFLQRSSNFQCQKLLWQLNGRLEYCLKDRMNFDIPEEIKQLQQFQKEDAALTIYEMLQNIFAIFRQDSSSTGWNETIVENLLANVYHQINHLKTVLEEKLEKEDFTRGKLMSSLHLKRYYGRILHYLKAKEYSHCAWTIVRVEILRNFYFINRLTGYLHN

SEQ ID NO: 1015 - protein, 166 aa, Homo sapiens
MSYNLLGFLQRSSNFQCQKLLWQLNGRLEYCLKDRMNFDIPEEIKQLQQFQKEDAALTIYEMLQNIFAIFRQDSSSTGWNETIVENLLANVYHQINHLKTVLEEKLEKEDFTRGKLMSSLHLKRYYGRILHYLKAKEYSHCAWTIVRVEILRNFYFINRLTGYLQN

SEQ ID NO: 1016 - protein, 166 aa, Homo sapiens
VSYNLLGFLQRSSNFQCQKLLWQLNGRLEYCLKDRMNFDIPEEIKQLQQFQKEDAALTIYEMLQNIFAIFRQDSSSTGWNETIVENLLANVYHQINHLKTVLEEKLEKEDFTRGKLMSSLHLKRYYGRILHYLKAKEYSHCAWTIVRVEILRNFYFINRLTGYLRN

SEQ ID NO: 1017 - protein, 166 aa, Homo sapiens
ISYNLLGFLQRSSNFQCQKLLWQLNGRLEYCLKDRMNFDIPEEIKQLQQFQKEDAALTIYEMLQNIFAIFRQDSSSTGWNETIVENLLANVYHQINHLKTVLEEKLEKEDFTRGKLMSSLHLKRYYGRILHYLKAKEYSHCAWTIVRVEILRNFYFINRLTGYLRN

SEQ ID NO: 1018 - protein, 166 aa, Homo sapiens
TSYNLLGFLQRSSNFQCQKLLWQLNGRLEYCLKDRMNFDIPEEIKQLQQFQKEDAALTIYEMLQNIFAIFRQDSSSTGWNETIVENLLANVYHQINHLKTVLEEKLEKEDFTRGKLMSSLHLKRYYGRILHYLKAKEYSHCAWTIVRVEILRNFYFINRLTGYLRN

SEQ ID NO: 1019 - protein, 166 aa, Homo sapiens
ASYNLLGFLQRSSNFQCQKLLWQLNGRLEYCLKDRMNFDIPEEIKQLQQFQKEDAALTIYEMLQNIFAIFRQDSSSTGWNETIVENLLANVYHQINHLKTVLEEKLEKEDFTRGKLMSSLHLKRYYGRILHYLKAKEYSHCAWTIVRVEILRNFYFINRLTGYLRN

SEQ ID NO: 1020 - protein, 166 aa, Homo sapiens
MSYNVLGFLQRSSNFQCQKLLWQLNGRLEYCLKDRMNFDIPEEIKQLQQFQKEDAALTIYEMLQNIFAIFRQDSSSTGWNETIVENLLANVYHQINHLKTVLEEKLEKEDFTRGKLMSSLHLKRYYGRILHYLKAKEYSHCAWTIVRVEILRNFYFINRLTGYLRN

SEQ ID NO: 1021 - protein, 166 aa, Homo sapiens
MSYNILGFLQRSSNFQCQKLLWQLNGRLEYCLKDRMNFDIPEEIKQLQQFQKEDAALTIYEMLQNIFAIFRQDSSSTGWNETIVENLLANVYHQINHLKTVLEEKLEKEDFTRGKLMSSLHLKRYYGRILHYLKAKEYSHCAWTIVRVEILRNFYFINRLTGYLRN

SEQ ID NO: 1022 - protein, 166 aa, Homo sapiens
MSYNTLGFLQRSSNFQCQKLLWQLNGRLEYCLKDRMNFDIPEEIKQLQQFQKEDAALTIYEMLQNIFAIFRQDSSSTGWNETIVENLLANVYHQINHLKTVLEEKLEKEDFTRGKLMSSLHLKRYYGRILHYLKAKEYSHCAWTIVRVEILRNFYFINRLTGYLRN

SEQ ID NO: 1023 - protein, 166 aa, Homo sapiens
MSYNQLGFLQRSSNFQCQKLLWQLNGRLEYCLKDRMNFDIPEEIKQLQQFQKEDAALTIYEMLQNIFAIFRQDSSSTGWNETIVENLLANVYHQINHLKTVLEEKLEKEDFTRGKLMSSLHLKRYYGRILHYLKAKEYSHCAWTIVRVEILRNFYFINRLTGYLRN

SEQ ID NO: 1024 - protein, 166 aa, Homo sapiens
MSYNHLGFLQRSSNFQCQKLLWQLNGRLEYCLKDRMNFDIPEEIKQLQQFQKEDAALTIYEMLQNIFAIFRQDSSSTGWNETIVENLLANVYHQINHLKTVLEEKLEKEDFTRGKLMSSLHLKRYYGRILHYLKAKEYSHCAWTIVRVEILRNFYFINRLTGYLRN

SEQ ID NO: 1025 - protein, 166 aa, Homo sapiens
MSYNALGFLQRSSNFQCQKLLWQLNGRLEYCLKDRMNFDIPEEIKQLQQFQKEDAALTIYEMLQNIFAIFRQDSSSTGWNETIVENLLANVYHQINHLKTVLEEKLEKEDFTRGKLMSSLHLKRYYGRILHYLKAKEYSHCAWTIVRVEILRNFYFINRLTGYLRN

SEQ ID NO: 1026 - protein, 166 aa, Homo sapiens
MSYNLLGILQRSSNFQCQKLLWQLNGRLEYCLKDRMNFDIPEEIKQLQQFQKEDAALTIYEMLQNIFAIFRQDSSSTGWNETIVENLLANVYHQINHLKTVLEEKLEKEDFTRGKLMSSLHLKRYYGRILHYLKAKEYSHCAWTIVRVEILRNFYFINRLTGYLRN

SEQ ID NO: 1027 - protein, 166 aa, Homo sapiens
MSYNLLGVLQRSSNFQCQKLLWQLNGRLEYCLKDRMNFDIPEEIKQLQQFQKEDAALTIYEMLQNIFAIFRQDSSSTGWNETIVENLLANVYHQINHLKTVLEEKLEKEDFTRGKLMSSLHLKRYYGRILHYLKAKEYSHCAWTIVRVEILRNFYFINRLTGYLRN

SEQ ID NO: 1028 - protein, 166 aa, Homo sapiens
MSYNLLGFVQRSSNFQCQKLLWQLNGRLEYCLKDRMNFDIPEEIKQLQQFQKEDAALTIYEMLQNIFAIFRQDSSSTGWNETIVENLLANVYHQINHLKTVLEEKLEKEDFTRGKLMSSLHLKRYYGRILHYLKAKEYSHCAWTIVRVEILRNFYFINRLTGYLRN

SEQ ID NO: 1029 - protein, 166 aa, Homo sapiens
MSYNLLGFIQRSSNFQCQKLLWQLNGRLEYCLKDRMNFDIPEEIKQLQQFQKEDAALTIYEMLQNIFAIFRQDSSSTGWNETIVENLLANVYHQINHLKTVLEEKLEKEDFTRGKLMSSLHLKRYYGRILHYLKAKEYSHCAWTIVRVEILRNFYFINRLTGYLRN

SEQ ID NO: 1030 - protein, 166 aa, Homo sapiens
MSYNLLGFTQRSSNFQCQKLLWQLNGRLEYCLKDRMNFDIPEEIKQLQQFQKEDAALTIYEMLQNIFAIFRQDSSSTGWNETIVENLLANVYHQINHLKTVLEEKLEKEDFTRGKLMSSLHLKRYYGRILHYLKAKEYSHCAWTIVRVEILRNFYFINRLTGYLRN

SEQ ID NO: 1031 - protein, 166 aa, Homo sapiens
MSYNLLGFQQRSSNFQCQKLLWQLNGRLEYCLKDRMNFDIPEEIKQLQQFQKEDAALTIYEMLQNIFAIFRQDSSSTGWNETIVENLLANVYHQINHLKTVLEEKLEKEDFTRGKLMSSLHLKRYYGRILHYLKAKEYSHCAWTIVRVEILRNFYFINRLTGYLRN

SEQ ID NO: 1032 - protein, 166 aa, Homo sapiens
MSYNLLGFHQRSSNFQCQKLLWQLNGRLEYCLKDRMNFDIPEEIKQLQQFQKEDAALTIYEMLQNIFAIFRQDSSSTGWNETIVENLLANVYHQINHLKTVLEEKLEKEDFTRGKLMSSLHLKRYYGRILHYLKAKEYSHCAWTIVRVEILRNFYFINRLTGYLRN

SEQ ID NO: 1033 - protein, 166 aa, Homo sapiens
MSYNLLGFAQRSSNFQCQKLLWQLNGRLEYCLKDRMNFDIPEEIKQLQQFQKEDAALTIYEMLQNIFAIFRQDSSSTGWNETIVENLLANVYHQINHLKTVLEEKLEKEDFTRGKLMSSLHLKRYYGRILHYLKAKEYSHCAWTIVRVEILRNFYFINRLTGYLRN

SEQ ID NO: 1034 - protein, 166 aa, Homo sapiens
MSYNLLGFLQHSSNFQCQKLLWQLNGRLEYCLKDRMNFDIPEEIKQLQQFQKEDAALTIYEMLQNIFAIFRQDSSSTGWNETIVENLLANVYHQINHLKTVLEEKLEKEDFTRGKLMSSLHLKRYYGRILHYLKAKEYSHCAWTIVRVEILRNFYFINRLTGYLRN

SEQ ID NO: 1035 - protein, 166 aa, Homo sapiens
MSYNLLGFLQQSSNFQCQKLLWQLNGRLEYCLKDRMNFDIPEEIKQLQQFQKEDAALTIYEMLQNIFAIFRQDSSSTGWNETIVENLLANVYHQINHLKTVLEEKLEKEDFTRGKLMSSLHLKRYYGRILHYLKAKEYSHCAWTIVRVEILRNFYFINRLTGYLRN

SEQ ID NO: 1036 - protein, 166 aa, Homo sapiens
MSYNLLGFLQRSSNIQCQKLLWQLNGRLEYCLKDRMNFDIPEEIKQLQQFQKEDAALTIYEMLQNIFAIFRQDSSSTGWNETIVENLLANVYHQINHLKTVLEEKLEKEDFTRGKLMSSLHLKRYYGRILHYLKAKEYSHCAWTIVRVEILRNFYFINRLTGYLRN

SEQ ID NO: 1037 - protein, 166 aa, Homo sapiens
MSYNLLGFLQRSSNVQCQKLLWQLNGRLEYCLKDRMNFDIPEEIKQLQQFQKEDAALTIYEMLQNIFAIFRQDSSSTGWNETIVENLLANVYHQINHLKTVLEEKLEKEDFTRGKLMSSLHLKRYYGRILHYLKAKEYSHCAWTIVRVEILRNFYFINRLTGYLRN

SEQ ID NO: 1038 - protein, 166 aa, Homo sapiens
MSYNLLGFLQRSSNFQCQQLLWQLNGRLEYCLKDRMNFDIPEEIKQLQQFQKEDAALTIYEMLQNIFAIFRQDSSSTGWNETIVENLLANVYHQINHLKTVLEEKLEKEDFTRGKLMSSLHLKRYYGRILHYLKAKEYSHCAWTIVRVEILRNFYFINRLTGYLRN

SEQ ID NO: 1039 - protein, 166 aa, Homo sapiens
MSYNLLGFLQRSSNFQCQTLLWQLNGRLEYCLKDRMNFDIPEEIKQLQQFQKEDAALTIYEMLQNIFAIFRQDSSSTGWNETIVENLLANVYHQINHLKTVLEEKLEKEDFTRGKLMSSLHLKRYYGRILHYLKAKEYSHCAWTIVRVEILRNFYFINRLTGYLRN

SEQ ID NO: 1040 - protein, 166 aa, Homo sapiens
MSYNLLGFLQRSSNFQCQSLLWQLNGRLEYCLKDRMNFDIPEEIKQLQQFQKEDAALTIYEMLQNIFAIFRQDSSSTGWNETIVENLLANVYHQINHLKTVLEEKLEKEDFTRGKLMSSLHLKRYYGRILHYLKAKEYSHCAWTIVRVEILRNFYFINRLTGYLRN

SEQ ID NO: 1041 - protein, 166 aa, Homo sapiens
MSYNLLGFLQRSSNFQCQHLLWQLNGRLEYCLKDRMNFDIPEEIKQLQQFQKEDAALTIYEMLQNIFAIFRQDSSSTGWNETIVENLLANVYHQINHLKTVLEEKLEKEDFTRGKLMSSLHLKRYYGRILHYLKAKEYSHCAWTIVRVEILRNFYFINRLTGYLRN

SEQ ID NO: 1042 - protein, 166 aa, Homo sapiens
MSYNLLGFLQRSSNFQCQKLLSQLNGRLEYCLKDRMNFDIPEEIKQLQQFQKEDAALTIYEMLQNIFAIFRQDSSSTGWNETIVENLLANVYHQINHLKTVLEEKLEKEDFTRGKLMSSLHLKRYYGRILHYLKAKEYSHCAWTIVRVEILRNFYFINRLTGYLRN

SEQ ID NO: 1043 - protein, 165 aa, Homo sapiens
MSYNLLGFLQRSSNFQCQKLLHQLNGRLEYCLKDRMNFDIPEEIKQLQQFQKEDAALTIYEMLQNIFAIFRQDSSSTGWNETIVENLLANVYHQINHLKTVLEEKLEKEDFTRGKLMSSLHLKRYYGRILHYLKAKEYSHCAWTIVRVEILRNFYFINRLTGYLR

SEQ ID NO: 1044 - protein, 166 aa, Homo sapiens
MSYNLLGFLQRSSNFQCQKLLWQLHGRLEYCLKDRMNFDIPEEIKQLQQFQKEDAALTIYEMLQNIFAIFRQDSSSTGWNETIVENLLANVYHQINHLKTVLEEKLEKEDFTRGKLMSSLHLKRYYGRILHYLKAKEYSHCAWTIVRVEILRNFYFINRLTGYLRN

SEQ ID NO: 1045 - protein, 166 aa, Homo sapiens
MSYNLLGFLQRSSNFQCQKLLWQLSGRLEYCLKDRMNFDIPEEIKQLQQFQKEDAALTIYEMLQNIFAIFRQDSSSTGWNETIVENLLANVYHQINHLKTVLEEKLEKEDFTRGKLMSSLHLKRYYGRILHYLKAKEYSHCAWTIVRVEILRNFYFINRLTGYLRN

SEQ ID NO: 1046 - protein, 166 aa, Homo sapiens
MSYNLLGFLQRSSNFQCQKLLWQLQGRLEYCLKDRMNFDIPEEIKQLQQFQKEDAALTIYEMLQNIFAIFRQDSSSTGWNETIVENLLANVYHQINHLKTVLEEKLEKEDFTRGKLMSSLHLKRYYGRILHYLKAKEYSHCAWTIVRVEILRNFYFINRLTGYLRN

SEQ ID NO: 1047 - protein, 166 aa, Homo sapiens
MSYNLLGFLQRSSNFQCQKLLWQLNGHLEYCLKDRMNFDIPEEIKQLQQFQKEDAALTIYEMLQNIFAIFRQDSSSTGWNETIVENLLANVYHQINHLKTVLEEKLEKEDFTRGKLMSSLHLKRYYGRILHYLKAKEYSHCAWTIVRVEILRNFYFINRLTGYLRN

SEQ ID NO: 1048 - protein, 166 aa, Homo sapiens
MSYNLLGFLQRSSNFQCQKLLWQLNGQLEYCLKDRMNFDIPEEIKQLQQFQKEDAALTIYEMLQNIFAIFRQDSSSTGWNETIVENLLANVYHQINHLKTVLEEKLEKEDFTRGKLMSSLHLKRYYGRILHYLKAKEYSHCAWTIVRVEILRNFYFINRLTGYLRN

SEQ ID NO: 1049 - protein, 166 aa, Homo sapiens
MSYNLLGFLQRSSNFQCQKLLWQLNGRVEYCLKDRMNFDIPEEIKQLQQFQKEDAALTIYEMLQNIFAIFRQDSSSTGWNETIVENLLANVYHQINHLKTVLEEKLEKEDFTRGKLMSSLHLKRYYGRILHYLKAKEYSHCAWTIVRVEILRNFYFINRLTGYLRN

SEQ ID NO: 1050 - protein, 166 aa, Homo sapiens
MSYNLLGFLQRSSNFQCQKLLWQLNGRIEYCLKDRMNFDIPEEIKQLQQFQKEDAALTIYEMLQNIFAIFRQDSSSTGWNETIVENLLANVYHQINHLKTVLEEKLEKEDFTRGKLMSSLHLKRYYGRILHYLKAKEYSHCAWTIVRVEILRNFYFINRLTGYLRN

SEQ ID NO: 1051 - protein, 166 aa, Homo sapiens
MSYNLLGFLQRSSNFQCQKLLWQLNGRTEYCLKDRMNFDIPEEIKQLQQFQKEDAALTIYEMLQNIFAIFRQDSSSTGWNETIVENLLANVYHQINHLKTVLEEKLEKEDFTRGKLMSSLHLKRYYGRILHYLKAKEYSHCAWTIVRVEILRNFYFINRLTGYLRN

SEQ ID NO: 1052 - protein, 166 aa, Homo sapiens
MSYNLLGFLQRSSNFQCQKLLWQLNGRQEYCLKDRMNFDIPEEIKQLQQFQKEDAALTIYEMLQNIFAIFRQDSSSTGWNETIVENLLANVYHQINHLKTVLEEKLEKEDFTRGKLMSSLHLKRYYGRILHYLKAKEYSHCAWTIVRVEILRNFYFINRLTGYLRN

SEQ ID NO: 1053 - protein, 166 aa, Homo sapiens
MSYNLLGFLQRSSNFQCQKLLWQLNGRHEYCLKDRMNFDIPEEIKQLQQFQKEDAALTIYEMLQNIFAIFRQDSSSTGWNETIVENLLANVYHQINHLKTVLEEKLEKEDFTRGKLMSSLHLKRYYGRILHYLKAKEYSHCAWTIVRVEILRNFYFINRLTGYLRN

SEQ ID NO: 1054 - protein, 166 aa, Homo sapiens
MSYNLLGFLQRSSNFQCQKLLWQLNGRAEYCLKDRMNFDIPEEIKQLQQFQKEDAALTIYEMLQNIFAIFRQDSSSTGWNETIVENLLANVYHQINHLKTVLEEKLEKEDFTRGKLMSSLHLKRYYGRILHYLKAKEYSHCAWTIVRVEILRNFYFINRLTGYLRN

SEQ ID NO: 1055 - protein, 166 aa, Homo sapiens
MSYNLLGFLQRSSNFQCQKLLWQLNGRLQYCLKDRMNFDIPEEIKQLQQFQKEDAALTIYEMLQNIFAIFRQDSSSTGWNETIVENLLANVYHQINHLKTVLEEKLEKEDFTRGKLMSSLHLKRYYGRILHYLKAKEYSHCAWTIVRVEILRNFYFINRLTGYLRN

SEQ ID NO: 1056 - protein, 166 aa, Homo sapiens
MSYNLLGFLQRSSNFQCQKLLWQLNGRLHYCLKDRMNFDIPEEIKQLQQFQKEDAALTIYEMLQNIFAIFRQDSSSTGWNETIVENLLANVYHQINHLKTVLEEKLEKEDFTRGKLMSSLHLKRYYGRILHYLKAKEYSHCAWTIVRVEILRNFYFINRLTGYLRN

SEQ ID NO: 1057 - protein, 166 aa, Homo sapiens
MSYNLLGFLQRSSNFQCQKLLWQLNGRLEHCLKDRMNFDIPEEIKQLQQFQKEDAALTIYEMLQNIFAIFRQDSSSTGWNETIVENLLANVYHQINHLKTVLEEKLEKEDFTRGKLMSSLHLKRYYGRILHYLKAKEYSHCAWTIVRVEILRNFYFINRLTGYLRN

SEQ ID NO: 1058 - protein, 166 aa, Homo sapiens
MSYNLLGFLQRSSNFQCQKLLWQLNGRLEICLKDRMNFDIPEEIKQLQQFQKEDAALTIYEMLQNIFAIFRQDSSSTGWNETIVENLLANVYHQINHLKTVLEEKLEKEDFTRGKLMSSLHLKRYYGRILHYLKAKEYSHCAWTIVRVEILRNFYFINRLTGYLRN

SEQ ID NO: 1059 - protein, 166 aa, Homo sapiens
MSYNLLGFLQRSSNFQCQKLLWQLNGRLEYCVKDRMNFDIPEEIKQLQQFQKEDAALTIYEMLQNIFAIFRQDSSSTGWNETIVENLLANVYHQINHLKTVLEEKLEKEDFTRGKLMSSLHLKRYYGRILHYLKAKEYSHCAWTIVRVEILRNFYFINRLTGYLRN

SEQ ID NO: 1060 - protein, 166 aa, Homo sapiens
MSYNLLGFLQRSSNFQCQKLLWQLNGRLEYCIKDRMNFDIPEEIKQLQQFQKEDAALTIYEMLQNIFAIFRQDSSSTGWNETIVENLLANVYHQINHLKTVLEEKLEKEDFTRGKLMSSLHLKRYYGRILHYLKAKEYSHCAWTIVRVEILRNFYFINRLTGYLRN

SEQ ID NO: 1061 - protein, 166 aa, Homo sapiens
MSYNLLGFLQRSSNFQCQKLLWQLNGRLEYCTKDRMNFDIPEEIKQLQQFQKEDAALTIYEMLQNIFAIFRQDSSSTGWNETIVENLLANVYHQINHLKTVLEEKLEKEDFTRGKLMSSLHLKRYYGRILHYLKAKEYSHCAWTIVRVEILRNFYFINRLTGYLRN

SEQ ID NO: 1062 - protein, 166 aa, Homo sapiens
MSYNLLGFLQRSSNFQCQKLLWQLNGRLEYCQKDRMNFDIPEEIKQLQQFQKEDAALTIYEMLQNIFAIFRQDSSSTGWNETIVENLLANVYHQINHLKTVLEEKLEKEDFTRGKLMSSLHLKRYYGRILHYLKAKEYSHCAWTIVRVEILRNFYFINRLTGYLRN

SEQ ID NO: 1063 - protein, 166 aa, Homo sapiens
MSYNLLGFLQRSSNFQCQKLLWQLNGRLEYCHKDRMNFDIPEEIKQLQQFQKEDAALTIYEMLQNIFAIFRQDSSSTGWNETIVENLLANVYHQINHLKTVLEEKLEKEDFTRGKLMSSLHLKRYYGRILHYLKAKEYSHCAWTIVRVEILRNFYFINRLTGYLRN

SEQ ID NO: 1064 - protein, 166 aa, Homo sapiens
MSYNLLGFLQRSSNFQCQKLLWQLNGRLEYCAKDRMNFDIPEEIKQLQQFQKEDAALTIYEMLQNIFAIFRQDSSSTGWNETIVENLLANVYHQINHLKTVLEEKLEKEDFTRGKLMSSLHLKRYYGRILHYLKAKEYSHCAWTIVRVEILRNFYFINRLTGYLRN

SEQ ID NO: 1065 - protein, 166 aa, Homo sapiens
QSYNLLGFLQRSSNFQCQKLLWQLNGRLEYCLKDRMNFDIPEEIKQLQQFQKEDAALTIYEMLQNIFAIFRQDSSSTGWNETIVENLLANVYHQINHLKTVLEEKLEKEDFTRGKLMSSLHLKRYYGRILHYLKAKEYSHCAWTIVRVEILRNFYFINRLTGYLRN

SEQ ID NO: 1066 - protein, 166 aa, Homo sapiens
MSYNLLGFLQRSSNFQCQKLLWQLNGRLEYCLQDRMNFDIPEEIKQLQQFQKEDAALTIYEMLQNIFAIFRQDSSSTGWNETIVENLLANVYHQINHLKTVLEEKLEKEDFTRGKLMSSLHLKRYYGRILHYLKAKEYSHCAWTIVRVEILRNFYFINRLTGYLRN

SEQ ID NO: 1067 - protein, 166 aa, Homo sapiens
MSYNLLGFLQRSSNFQCQKLLWQLNGRLEYCLTDRMNFDIPEEIKQLQQFQKEDAALTIYEMLQNIFAIFRQDSSSTGWNETIVENLLANVYHQINHLKTVLEEKLEKEDFTRGKLMSSLHLKRYYGRILHYLKAKEYSHCAWTIVRVEILRNFYFINRLTGYLRN

SEQ ID NO: 1068 - protein, 166 aa, Homo sapiens
MSYNLLGFLQRSSNFQCQKLLWQLNGRLEYCLSDRMNFDIPEEIKQLQQFQKEDAALTIYEMLQNIFAIFRQDSSSTGWNETIVENLLANVYHQINHLKTVLEEKLEKEDFTRGKLMSSLHLKRYYGRILHYLKAKEYSHCAWTIVRVEILRNFYFINRLTGYLRN

SEQ ID NO: 1069 - protein, 166 aa, Homo sapiens
MSYNLLGFLQRSSNFQCQKLLWQLNGRLEYCLHDRMNFDIPEEIKQLQQFQKEDAALTIYEMLQNIFAIFRQDSSSTGWNETIVENLLANVYHQINHLKTVLEEKLEKEDFTRGKLMSSLHLKRYYGRILHYLKAKEYSHCAWTIVRVEILRNFYFINRLTGYLRN

SEQ ID NO: 1070 - protein, 166 aa, Homo sapiens
MSYNLLGFLQRSSNFQCQKLLWQLNGRLEYCLKDHMNFDIPEEIKQLQQFQKEDAALTIYEMLQNIFAIFRQDSSSTGWNETIVENLLANVYHQINHLKTVLEEKLEKEDFTRGKLMSSLHLKRYYGRILHYLKAKEYSHCAWTIVRVEILRNFYFINRLTGYLRN

SEQ ID NO: 1071 - protein, 166 aa, Homo sapiens
MSYNLLGFLQRSSNFQCQKLLWQLNGRLEYCLKDQMNFDIPEEIKQLQQFQKEDAALTIYEMLQNIFAIFRQDSSSTGWNETIVENLLANVYHQINHLKTVLEEKLEKEDFTRGKLMSSLHLKRYYGRILHYLKAKEYSHCAWTIVRVEILRNFYFINRLTGYLRN

SEQ ID NO: 1072 - protein, 166 aa, Homo sapiens
MSYNLLGFLQRSSNFQCQKLLWQLNGRLEYCLKDRVNFDIPEEIKQLQQFQKEDAALTIYEMLQNIFAIFRQDSSSTGWNETIVENLLANVYHQINHLKTVLEEKLEKEDFTRGKLMSSLHLKRYYGRILHYLKAKEYSHCAWTIVRVEILRNFYFINRLTGYLRN

SEQ ID NO: 1073 - protein, 166 aa, Homo sapiens
MSYNLLGFLQRSSNFQCQKLLWQLNGRLEYCLKDRINFDIPEEIKQLQQFQKEDAALTIYEMLQNIFAIFRQDSSSTGWNETIVENLLANVYHQINHLKTVLEEKLEKEDFTRGKLMSSLHLKRYYGRILHYLKAKEYSHCAWTIVRVEILRNFYFINRLTGYLRN

SEQ ID NO: 1074 - protein, 166 aa, Homo sapiens
MSYNLLGFLQRSSNFQCQKLLWQLNGRLEYCLKDRTNFDIPEEIKQLQQFQKEDAALTIYEMLQNIFAIFRQDSSSTGWNETIVENLLANVYHQINHLKTVLEEKLEKEDFTRGKLMSSLHLKRYYGRILHYLKAKEYSHCAWTIVRVEILRNFYFINRLTGYLRN

SEQ ID NO: 1075 - protein, 166 aa, Homo sapiens
MSYNLLGFLQRSSNFQCQKLLWQLNGRLEYCLKDRQNFDIPEEIKQLQQFQKEDAALTIYEMLQNIFAIFRQDSSSTGWNETIVENLLANVYHQINHLKTVLEEKLEKEDFTRGKLMSSLHLKRYYGRILHYLKAKEYSHCAWTIVRVEILRNFYFINRLTGYLRN

SEQ ID NO: 1076 - protein, 166 aa, Homo sapiens
MSYNLLGFLQRSSNFQCQKLLWQLNGRLEYCLKDRANFDIPEEIKQLQQFQKEDAALTIYEMLQNIFAIFRQDSSSTGWNETIVENLLANVYHQINHLKTVLEEKLEKEDFTRGKLMSSLHLKRYYGRILHYLKAKEYSHCAWTIVRVEILRNFYFINRLTGYLRN

SEQ ID NO: 1077 - protein, 166 aa, Homo sapiens
MSYNLLGFLQRSSNFQCQKLLWQLNGRLEYCLKDRMNFDIPEEIKQLQQFQKEDAALTIYEMLQNIFAIFRQDSSSTGWNETIVQNLLANVYHQINHLKTVLEEKLEKEDFTRGKLMSSLHLKRYYGRILHYLKAKEYSHCAWTIVRVEILRNFYFINRLTGYLRN

SEQ ID NO: 1078 - protein, 166 aa, Homo sapiens
MSYNLLGFLQRSSNFQCQKLLWQLNGRLEYCLKDRMNFDIPEEIKQLQQFQKEDAALTIYEMLQNIFAIFRQDSSSTGWNETIVHNLLANVYHQINHLKTVLEEKLEKEDFTRGKLMSSLHLKRYYGRILHYLKAKEYSHCAWTIVRVEILRNFYFINRLTGYLRN

SEQ ID NO: 1079 - protein, 166 aa, Homo sapiens
MSYNLLGFLQRSSNFQCQKLLWQLNGRLEYCLKDRMNFDIPEEIKQLQQFQKEDAALTIYEMLQNIFAIFRQDSSSTGWNETIVENLLANVHHQINHLKTVLEEKLEKEDFTRGKLMSSLHLKRYYGRILHYLKAKEYSHCAWTIVRVEILRNFYFINRLTGYLRN

SEQ ID NO: 1080 - protein, 166 aa, Homo sapiens
MSYNLLGFLQRSSNFQCQKLLWQLNGRLEYCLKDRMNFDIPEEIKQLQQFQKEDAALTIYEMLQNIFAIFRQDSSSTGWNETIVENLLANVIHQINHLKTVLEEKLEKEDFTRGKLMSSLHLKRYYGRILHYLKAKEYSHCAWTIVRVEILRNFYFINRLTGYLRN

SEQ ID NO: 1081 - protein, 166 aa, Homo sapiens
MSYNLLGFLQRSSNFQCQKLLWQLNGRLEYCLKDRMNFDIPEEIKQLQQFQKEDAALTIYEMLQNIFAIFRQDSSSTGWNETIVENLLANVYHQINHLQTVLEEKLEKEDFTRGKLMSSLHLKRYYGRILHYLKAKEYSHCAWTIVRVEILRNFYFINRLTGYLRN

SEQ ID NO: 1082 - protein, 166 aa, Homo sapiens
MSYNLLGFLQRSSNFQCQKLLWQLNGRLEYCLKDRMNFDIPEEIKQLQQFQKEDAALTIYEMLQNIFAIFRQDSSSTGWNETIVENLLANVYHQINHLTTVLEEKLEKEDFTRGKLMSSLHLKRYYGRILHYLKAKEYSHCAWTIVRVEILRNFYFINRLTGYLRN

SEQ ID NO: 1083 - protein, 166 aa, Homo sapiens
MSYNLLGFLQRSSNFQCQKLLWQLNGRLEYCLKDRMNFDIPEEIKQLQQFQKEDAALTIYEMLQNIFAIFRQDSSSTGWNETIVENLLANVYHQINHLSTVLEEKLEKEDFTRGKLMSSLHLKRYYGRILHYLKAKEYSHCAWTIVRVEILRNFYFINRLTGYLRN

SEQ ID NO: 1084 - protein, 166 aa, Homo sapiens
MSYNLLGFLQRSSNFQCQKLLWQLNGRLEYCLKDRMNFDIPEEIKQLQQFQKEDAALTIYEMLQNIFAIFRQDSSSTGWNETIVENLLANVYHQINHLHTVLEEKLEKEDFTRGKLMSSLHLKRYYGRILHYLKAKEYSHCAWTIVRVEILRNFYFINRLTGYLRN

SEQ ID NO: 1085 - protein, 166 aa, Homo sapiens
MSYNLLGFLQRSSNFQCQKLLWQLNGRLEYCLKDRMNFDIPEEIKQLQQFQKEDAALTIYEMLQNIFAIFRQDSSSTGWNETIVENLLANVYHQINHLKTVLQEKLEKEDFTRGKLMSSLHLKRYYGRILHYLKAKEYSHCAWTIVRVEILRNFYFINRLTGYLRN

SEQ ID NO: 1086 - protein, 166 aa, Homo sapiens
MSYNLLGFLQRSSNFQCQKLLWQLNGRLEYCLKDRMNFDIPEEIKQLQQFQKEDAALTIYEMLQNIFAIFRQDSSSTGWNETIVENLLANVYHQINHLKTVLHEKLEKEDFTRGKLMSSLHLKRYYGRILHYLKAKEYSHCAWTIVRVEILRNFYFINRLTGYLRN

SEQ ID NO: 1087 - protein, 166 aa, Homo sapiens
MSYNLLGFLQRSSNFQCQKLLWQLNGRLEYCLKDRMNFDIPEEIKQLQQFQKEDAALTIYEMLQNIFAIFRQDSSSTGWNETIVENLLANVYHQINHLKTVLEQKLEKEDFTRGKLMSSLHLKRYYGRILHYLKAKEYSHCAWTIVRVEILRNFYFINRLTGYLRN

SEQ ID NO: 1088 - protein, 166 aa, Homo sapiens
MSYNLLGFLQRSSNFQCQKLLWQLNGRLEYCLKDRMNFDIPEEIKQLQQFQKEDAALTIYEMLQNIFAIFRQDSSSTGWNETIVENLLANVYHQINHLKTVLEHKLEKEDFTRGKLMSSLHLKRYYGRILHYLKAKEYSHCAWTIVRVEILRNFYFINRLTGYLRN

SEQ ID NO: 1089 - protein, 166 aa, Homo sapiens
MSYNLLGFLQRSSNFQCQKLLWQLNGRLEYCLKDRMNFDIPEEIKQLQQFQKEDAALTIYEMLQNIFAIFRQDSSSTGWNETIVENLLANVYHQINHLKTVLEEQLEKEDFTRGKLMSSLHLKRYYGRILHYLKAKEYSHCAWTIVRVEILRNFYFINRLTGYLRN

SEQ ID NO: 1090 - protein, 166 aa, Homo sapiens
MSYNLLGFLQRSSNFQCQKLLWQLNGRLEYCLKDRMNFDIPEEIKQLQQFQKEDAALTIYEMLQNIFAIFRQDSSSTGWNETIVENLLANVYHQINHLKTVLEETLEKEDFTRGKLMSSLHLKRYYGRILHYLKAKEYSHCAWTIVRVEILRNFYFINRLTGYLRN

SEQ ID NO: 1091 - protein, 166 aa, Homo sapiens
MSYNLLGFLQRSSNFQCQKLLWQLNGRLEYCLKDRMNFDIPEEIKQLQQFQKEDAALTIYEMLQNIFAIFRQDSSSTGWNETIVENLLANVYHQINHLKTVLEESLEKEDFTRGKLMSSLHLKRYYGRILHYLKAKEYSHCAWTIVRVEILRNFYFINRLTGYLRN

SEQ ID NO: 1092 - protein, 166 aa, Homo sapiens
MSYNLLGFLQRSSNFQCQKLLWQLNGRLEYCLKDRMNFDIPEEIKQLQQFQKEDAALTIYEMLQNIFAIFRQDSSSTGWNETIVENLLANVYHQINHLKTVLEEHLEKEDFTRGKLMSSLHLKRYYGRILHYLKAKEYSHCAWTIVRVEILRNFYFINRLTGYLRN

SEQ ID NO: 1093 - protein, 166 aa, Homo sapiens
MSYNLLGFLQRSSNFQCQKLLWQLNGRLEYCLKDRMNFDIPEEIKQLQQFQKEDAALTIYEMLQNIFAIFRQDSSSTGWNETIVENLLANVYHQINHLKTVLEEKLEKEDFTRGKLMSSLHLKRYYGRILHYLKAKEHSHCAWTIVRVEILRNFYFINRLTGYLRN

SEQ ID NO: 1094 - protein, 166 aa, Homo sapiens
MSYNLLGFLQRSSNFQCQKLLWQLNGRLEYCLKDRMNFDIPEEIKQLQQFQKEDAALTIYEMLQNIFAIFRQDSSSTGWNETIVENLLANVYHQINHLKTVLEEKLEKEDFTRGKLMSSLHLKRYYGRILHYLKAKEISHCAWTIVRVEILRNFYFINRLTGYLRN

SEQ ID NO: 1095 - protein, 166 aa, Homo sapiens
MSYNLLGFLQRSSNFQCQKLLWQLNGRLEYCLKDRMNFDIPEEIKQLQQFQKEDAALTIYEMLQNIFAIFRQDSSSTGWNETIVENLLANVYHQINHLKTVLEEKLEKEDFTRGKLMSSLHLKRYYGRILHYLKAKEYSHCAWTIVRVEILHNFYFINRLTGYLRN

SEQ ID NO: 1096 - protein, 166 aa, Homo sapiens
MSYNLLGFLQRSSNFQCQKLLWQLNGRLEYCLKDRMNFDIPEEIKQLQQFQKEDAALTIYEMLQNIFAIFRQDSSSTGWNETIVENLLANVYHQINHLKTVLEEKLEKEDFTRGKLMSSLHLKRYYGRILHYLKAKEYSHCAWTIVRVEILQNFYFINRLTGYLRN

SEQ ID NO: 1097 - protein, 166 aa, Homo sapiens
MSYNLLGFLQRSSNFQCQKLLWQLNGRLEYCLKDRMNFDIPEEIKQLQQFQKEDAALTIYEMLQNIFAIFRQDSSSTGWNETIVENLLANVYHQINHLKTVLEEKLEKEDFTRGKLMSSLHLKRYYGRILHYLKAKEYSHCAWTIVRVEILRNFHFINRLTGYLRN

SEQ ID NO: 1098 - protein, 166 aa, Homo sapiens
MSYNLLGFLQRSSNFQCQKLLWQLNGRLEYCLKDRMNFDIPEEIKQLQQFQKEDAALTIYEMLQNIFAIFRQDSSSTGWNETIVENLLANVYHQINHLKTVLEEKLEKEDFTRGKLMSSLHLKRYYGRILHYLKAKEYSHCAWTIVRVEILRNFIFINRLTGYLRN

SEQ ID NO: 1099 - protein, 166 aa, Homo sapiens
MSYNLLGFLQRSSNFQCQKLLWQLNGRLEYCLKDRMNFDIPEEIKQLQQFQKEDAALTIYEMLQNIFAIFRQDSSSTGWNETIVENLLANVYHQINHLKTVLEEKLEKEDFTRGKLMSSLHLKRYYGRILHYLKAKEYSHCAWTIVRVEILRNFYFINHLTGYLRN

SEQ ID NO: 1100 - protein, 166 aa, Homo sapiens
MSYNLLGFLQRSSNFQCQKLLWQLNGRLEYCLKDRMNFDIPEEIKQLQQFQKEDAALTIYEMLQNIFAIFRQDSSSTGWNETIVENLLANVYHQINHLKTVLEEKLEKEDFTRGKLMSSLHLKRYYGRILHYLKAKEYSHCAWTIVRVEILRNFYFINQLTGYLRN

SEQ ID NO: 1101 - protein, 166 aa, Homo sapiens
DSYNLLGFLQRSSNFQCQKLLWQLNGRLEYCLKDRMNFDIPEEIKQLQQFQKEDAALTIYEMLQNIFAIFRQDSSSTGWNETIVENLLANVYHQINHLKTVLEEKLEKEDFTRGKLMSSLHLKRYYGRILHYLKAKEYSHCAWTIVRVEILRNFYFINRLTGYLRN

SEQ ID NO: 1102 - protein, 166 aa, Homo sapiens
ESYNLLGFLQRSSNFQCQKLLWQLNGRLEYCLKDRMNFDIPEEIKQLQQFQKEDAALTIYEMLQNIFAIFRQDSSSTGWNETIVENLLANVYHQINHLKTVLEEKLEKEDFTRGKLMSSLHLKRYYGRILHYLKAKEYSHCAWTIVRVEILRNFYFINRLTGYLRN

SEQ ID NO: 1103 - protein, 166 aa, Homo sapiens
KSYNLLGFLQRSSNFQCQKLLWQLNGRLEYCLKDRMNFDIPEEIKQLQQFQKEDAALTIYEMLQNIFAIFRQDSSSTGWNETIVENLLANVYHQINHLKTVLEEKLEKEDFTRGKLMSSLHLKRYYGRILHYLKAKEYSHCAWTIVRVEILRNFYFINRLTGYLRN

SEQ ID NO: 1104 - protein, 166 aa, Homo sapiens
NSYNLLGFLQRSSNFQCQKLLWQLNGRLEYCLKDRMNFDIPEEIKQLQQFQKEDAALTIYEMLQNIFAIFRQDSSSTGWNETIVENLLANVYHQINHLKTVLEEKLEKEDFTRGKLMSSLHLKRYYGRILHYLKAKEYSHCAWTIVRVEILRNFYFINRLTGYLRN

SEQ ID NO: 1105 - protein, 166 aa, Homo sapiens
RSYNLLGFLQRSSNFQCQKLLWQLNGRLEYCLKDRMNFDIPEEIKQLQQFQKEDAALTIYEMLQNIFAIFRQDSSSTGWNETIVENLLANVYHQINHLKTVLEEKLEKEDFTRGKLMSSLHLKRYYGRILHYLKAKEYSHCAWTIVRVEILRNFYFINRLTGYLRN

SEQ ID NO: 1106 - protein, 166 aa, Homo sapiens
SSYNLLGFLQRSSNFQCQKLLWQLNGRLEYCLKDRMNFDIPEEIKQLQQFQKEDAALTIYEMLQNIFAIFRQDSSSTGWNETIVENLLANVYHQINHLKTVLEEKLEKEDFTRGKLMSSLHLKRYYGRILHYLKAKEYSHCAWTIVRVEILRNFYFINRLTGYLRN

SEQ ID NO: 1107 - protein, 166 aa, Homo sapiens
MSYNDLGFLQRSSNFQCQKLLWQLNGRLEYCLKDRMNFDIPEEIKQLQQFQKEDAALTIYEMLQNIFAIFRQDSSSTGWNETIVENLLANVYHQINHLKTVLEEKLEKEDFTRGKLMSSLHLKRYYGRILHYLKAKEYSHCAWTIVRVEILRNFYFINRLTGYLRN

SEQ ID NO: 1108 - protein, 166 aa, Homo sapiens
MSYNELGFLQRSSNFQCQKLLWQLNGRLEYCLKDRMNFDIPEEIKQLQQFQKEDAALTIYEMLQNIFAIFRQDSSSTGWNETIVENLLANVYHQINHLKTVLEEKLEKEDFTRGKLMSSLHLKRYYGRILHYLKAKEYSHCAWTIVRVEILRNFYFINRLTGYLRN

SEQ ID NO: 1109 - protein, 166 aa, Homo sapiens
MSYNKLGFLQRSSNFQCQKLLWQLNGRLEYCLKDRMNFDIPEEIKQLQQFQKEDAALTIYEMLQNIFAIFRQDSSSTGWNETIVENLLANVYHQINHLKTVLEEKLEKEDFTRGKLMSSLHLKRYYGRILHYLKAKEYSHCAWTIVRVEILRNFYFINRLTGYLRN

SEQ ID NO: 1110 - protein, 166 aa, Homo sapiens
MSYNRLGFLQRSSNFQCQKLLWQLNGRLEYCLKDRMNFDIPEEIKQLQQFQKEDAALTIYEMLQNIFAIFRQDSSSTGWNETIVENLLANVYHQINHLKTVLEEKLEKEDFTRGKLMSSLHLKRYYGRILHYLKAKEYSHCAWTIVRVEILRNFYFINRLTGYLRN

SEQ ID NO: 1111 - protein, 166 aa, Homo sapiens
MSYNNLGFLQRSSNFQCQKLLWQLNGRLEYCLKDRMNFDIPEEIKQLQQFQKEDAALTIYEMLQNIFAIFRQDSSSTGWNETIVENLLANVYHQINHLKTVLEEKLEKEDFTRGKLMSSLHLKRYYGRILHYLKAKEYSHCAWTIVRVEILRNFYFINRLTGYLRN

SEQ ID NO: 1112 - protein, 166 aa, Homo sapiens
MSYNSLGFLQRSSNFQCQKLLWQLNGRLEYCLKDRMNFDIPEEIKQLQQFQKEDAALTIYEMLQNIFAIFRQDSSSTGWNETIVENLLANVYHQINHLKTVLEEKLEKEDFTRGKLMSSLHLKRYYGRILHYLKAKEYSHCAWTIVRVEILRNFYFINRLTGYLRN

SEQ ID NO: 1113 - protein, 166 aa, Homo sapiens
MSYNLDGFLQRSSNFQCQKLLWQLNGRLEYCLKDRMNFDIPEEIKQLQQFQKEDAALTIYEMLQNIFAIFRQDSSSTGWNETIVENLLANVYHQINHLKTVLEEKLEKEDFTRGKLMSSLHLKRYYGRILHYLKAKEYSHCAWTIVRVEILRNFYFINRLTGYLRN

SEQ ID NO: 1114 - protein, 166 aa, Homo sapiens
MSYNLEGFLQRSSNFQCQKLLWQLNGRLEYCLKDRMNFDIPEEIKQLQQFQKEDAALTIYEMLQNIFAIFRQDSSSTGWNETIVENLLANVYHQINHLKTVLEEKLEKEDFTRGKLMSSLHLKRYYGRILHYLKAKEYSHCAWTIVRVEILRNFYFINRLTGYLRN

SEQ ID NO: 1115 - protein, 166 aa, Homo sapiens
MSYNLKGFLQRSSNFQCQKLLWQLNGRLEYCLKDRMNFDIPEEIKQLQQFQKEDAALTIYEMLQNIFAIFRQDSSSTGWNETIVENLLANVYHQINHLKTVLEEKLEKEDFTRGKLMSSLHLKRYYGRILHYLKAKEYSHCAWTIVRVEILRNFYFINRLTGYLRN

SEQ ID NO: 1116 - protein, 166 aa, Homo sapiens
MSYNLNGFLQRSSNFQCQKLLWQLNGRLEYCLKDRMNFDIPEEIKQLQQFQKEDAALTIYEMLQNIFAIFRQDSSSTGWNETIVENLLANVYHQINHLKTVLEEKLEKEDFTRGKLMSSLHLKRYYGRILHYLKAKEYSHCAWTIVRVEILRNFYFINRLTGYLRN

SEQ ID NO: 1117 - protein, 166 aa, Homo sapiens
MSYNLQGFLQRSSNFQCQKLLWQLNGRLEYCLKDRMNFDIPEEIKQLQQFQKEDAALTIYEMLQNIFAIFRQDSSSTGWNETIVENLLANVYHQINHLKTVLEEKLEKEDFTRGKLMSSLHLKRYYGRILHYLKAKEYSHCAWTIVRVEILRNFYFINRLTGYLRN

SEQ ID NO: 1118 - protein, 166 aa, Homo sapiens
MSYNLRGFLQRSSNFQCQKLLWQLNGRLEYCLKDRMNFDIPEEIKQLQQFQKEDAALTIYEMLQNIFAIFRQDSSSTGWNETIVENLLANVYHQINHLKTVLEEKLEKEDFTRGKLMSSLHLKRYYGRILHYLKAKEYSHCAWTIVRVEILRNFYFINRLTGYLRN

SEQ ID NO: 1119 - protein, 166 aa, Homo sapiens
MSYNLSGFLQRSSNFQCQKLLWQLNGRLEYCLKDRMNFDIPEEIKQLQQFQKEDAALTIYEMLQNIFAIFRQDSSSTGWNETIVENLLANVYHQINHLKTVLEEKLEKEDFTRGKLMSSLHLKRYYGRILHYLKAKEYSHCAWTIVRVEILRNFYFINRLTGYLRN

SEQ ID NO: 1120 - protein, 166 aa, Homo sapiens
MSYNLTGFLQRSSNFQCQKLLWQLNGRLEYCLKDRMNFDIPEEIKQLQQFQKEDAALTIYEMLQNIFAIFRQDSSSTGWNETIVENLLANVYHQINHLKTVLEEKLEKEDFTRGKLMSSLHLKRYYGRILHYLKAKEYSHCAWTIVRVEILRNFYFINRLTGYLRN

SEQ ID NO: 1121 - protein, 166 aa, Homo sapiens
MSYNLLGDLQRSSNFQCQKLLWQLNGRLEYCLKDRMNFDIPEEIKQLQQFQKEDAALTIYEMLQNIFAIFRQDSSSTGWNETIVENLLANVYHQINHLKTVLEEKLEKEDFTRGKLMSSLHLKRYYGRILHYLKAKEYSHCAWTIVRVEILRNFYFINRLTGYLRN

SEQ ID NO: 1122 - protein, 166 aa, Homo sapiens
MSYNLLGELQRSSNFQCQKLLWQLNGRLEYCLKDRMNFDIPEEIKQLQQFQKEDAALTIYEMLQNIFAIFRQDSSSTGWNETIVENLLANVYHQINHLKTVLEEKLEKEDFTRGKLMSSLHLKRYYGRILHYLKAKEYSHCAWTIVRVEILRNFYFINRLTGYLRN

SEQ ID NO: 1123 - protein, 166 aa, Homo sapiens
MSYNLLGKLQRSSNFQCQKLLWQLNGRLEYCLKDRMNFDIPEEIKQLQQFQKEDAALTIYEMLQNIFAIFRQDSSSTGWNETIVENLLANVYHQINHLKTVLEEKLEKEDFTRGKLMSSLHLKRYYGRILHYLKAKEYSHCAWTIVRVEILRNFYFINRLTGYLRN

SEQ ID NO: 1124 - protein, 166 aa, Homo sapiens
MSYNLLGRLQRSSNFQCQKLLWQLNGRLEYCLKDRMNFDIPEEIKQLQQFQKEDAALTIYEMLQNIFAIFRQDSSSTGWNETIVENLLANVYHQINHLKTVLEEKLEKEDFTRGKLMSSLHLKRYYGRILHYLKAKEYSHCAWTIVRVEILRNFYFINRLTGYLRN

SEQ ID NO: 1125 - protein, 166 aa, Homo sapiens
MSYNLLGFDQRSSNFQCQKLLWQLNGRLEYCLKDRMNFDIPEEIKQLQQFQKEDAALTIYEMLQNIFAIFRQDSSSTGWNETIVENLLANVYHQINHLKTVLEEKLEKEDFTRGKLMSSLHLKRYYGRILHYLKAKEYSHCAWTIVRVEILRNFYFINRLTGYLRN

SEQ ID NO: 1126 - protein, 166 aa, Homo sapiens
MSYNLLGFEQRSSNFQCQKLLWQLNGRLEYCLKDRMNFDIPEEIKQLQQFQKEDAALTIYEMLQNIFAIFRQDSSSTGWNETIVENLLANVYHQINHLKTVLEEKLEKEDFTRGKLMSSLHLKRYYGRILHYLKAKEYSHCAWTIVRVEILRNFYFINRLTGYLRN

SEQ ID NO: 1127 - protein, 166 aa, Homo sapiens
MSYNLLGFKQRSSNFQCQKLLWQLNGRLEYCLKDRMNFDIPEEIKQLQQFQKEDAALTIYEMLQNIFAIFRQDSSSTGWNETIVENLLANVYHQINHLKTVLEEKLEKEDFTRGKLMSSLHLKRYYGRILHYLKAKEYSHCAWTIVRVEILRNFYFINRLTGYLRN

SEQ ID NO: 1128 - protein, 166 aa, Homo sapiens
MSYNLLGFNQRSSNFQCQKLLWQLNGRLEYCLKDRMNFDIPEEIKQLQQFQKEDAALTIYEMLQNIFAIFRQDSSSTGWNETIVENLLANVYHQINHLKTVLEEKLEKEDFTRGKLMSSLHLKRYYGRILHYLKAKEYSHCAWTIVRVEILRNFYFINRLTGYLRN

SEQ ID NO: 1129 - protein, 166 aa, Homo sapiens
MSYNLLGFRQRSSNFQCQKLLWQLNGRLEYCLKDRMNFDIPEEIKQLQQFQKEDAALTIYEMLQNIFAIFRQDSSSTGWNETIVENLLANVYHQINHLKTVLEEKLEKEDFTRGKLMSSLHLKRYYGRILHYLKAKEYSHCAWTIVRVEILRNFYFINRLTGYLRN

SEQ ID NO: 1130 - protein, 166 aa, Homo sapiens
MSYNLLGFSQRSSNFQCQKLLWQLNGRLEYCLKDRMNFDIPEEIKQLQQFQKEDAALTIYEMLQNIFAIFRQDSSSTGWNETIVENLLANVYHQINHLKTVLEEKLEKEDFTRGKLMSSLHLKRYYGRILHYLKAKEYSHCAWTIVRVEILRNFYFINRLTGYLRN

SEQ ID NO: 1131 - protein, 166 aa, Homo sapiens
MSYNLLGFLDRSSNFQCQKLLWQLNGRLEYCLKDRMNFDIPEEIKQLQQFQKEDAALTIYEMLQNIFAIFRQDSSSTGWNETIVENLLANVYHQINHLKTVLEEKLEKEDFTRGKLMSSLHLKRYYGRILHYLKAKEYSHCAWTIVRVEILRNFYFINRLTGYLRN

SEQ ID NO: 1132 - protein, 166 aa, Homo sapiens
MSYNLLGFLERSSNFQCQKLLWQLNGRLEYCLKDRMNFDIPEEIKQLQQFQKEDAALTIYEMLQNIFAIFRQDSSSTGWNETIVENLLANVYHQINHLKTVLEEKLEKEDFTRGKLMSSLHLKRYYGRILHYLKAKEYSHCAWTIVRVEILRNFYFINRLTGYLRN

SEQ ID NO: 1133 - protein, 166 aa, Homo sapiens
MSYNLLGFLKRSSNFQCQKLLWQLNGRLEYCLKDRMNFDIPEEIKQLQQFQKEDAALTIYEMLQNIFAIFRQDSSSTGWNETIVENLLANVYHQINHLKTVLEEKLEKEDFTRGKLMSSLHLKRYYGRILHYLKAKEYSHCAWTIVRVEILRNFYFINRLTGYLRN

SEQ ID NO: 1134 - protein, 166 aa, Homo sapiens
MSYNLLGFLNRSSNFQCQKLLWQLNGRLEYCLKDRMNFDIPEEIKQLQQFQKEDAALTIYEMLQNIFAIFRQDSSSTGWNETIVENLLANVYHQINHLKTVLEEKLEKEDFTRGKLMSSLHLKRYYGRILHYLKAKEYSHCAWTIVRVEILRNFYFINRLTGYLRN

SEQ ID NO: 1135 - protein, 166 aa, Homo sapiens
MSYNLLGFLRRSSNFQCQKLLWQLNGRLEYCLKDRMNFDIPEEIKQLQQFQKEDAALTIYEMLQNIFAIFRQDSSSTGWNETIVENLLANVYHQINHLKTVLEEKLEKEDFTRGKLMSSLHLKRYYGRILHYLKAKEYSHCAWTIVRVEILRNFYFINRLTGYLRN

SEQ ID NO: 1136 - protein, 166 aa, Homo sapiens
MSYNLLGFLSRSSNFQCQKLLWQLNGRLEYCLKDRMNFDIPEEIKQLQQFQKEDAALTIYEMLQNIFAIFRQDSSSTGWNETIVENLLANVYHQINHLKTVLEEKLEKEDFTRGKLMSSLHLKRYYGRILHYLKAKEYSHCAWTIVRVEILRNFYFINRLTGYLRN

SEQ ID NO: 1137 - protein, 166 aa, Homo sapiens
MSYNLLGFLTRSSNFQCQKLLWQLNGRLEYCLKDRMNFDIPEEIKQLQQFQKEDAALTIYEMLQNIFAIFRQDSSSTGWNETIVENLLANVYHQINHLKTVLEEKLEKEDFTRGKLMSSLHLKRYYGRILHYLKAKEYSHCAWTIVRVEILRNFYFINRLTGYLRN

SEQ ID NO: 1138 - protein, 166 aa, Homo sapiens
MSYNLLGFLQRDSNFQCQKLLWQLNGRLEYCLKDRMNFDIPEEIKQLQQFQKEDAALTIYEMLQNIFAIFRQDSSSTGWNETIVENLLANVYHQINHLKTVLEEKLEKEDFTRGKLMSSLHLKRYYGRILHYLKAKEYSHCAWTIVRVEILRNFYFINRLTGYLRN

SEQ ID NO: 1139 - protein, 166 aa, Homo sapiens
MSYNLLGFLQRESNFQCQKLLWQLNGRLEYCLKDRMNFDIPEEIKQLQQFQKEDAALTIYEMLQNIFAIFRQDSSSTGWNETIVENLLANVYHQINHLKTVLEEKLEKEDFTRGKLMSSLHLKRYYGRILHYLKAKEYSHCAWTIVRVEILRNFYFINRLTGYLRN

SEQ ID NO: 1140 - protein, 166 aa, Homo sapiens
MSYNLLGFLQRKSNFQCQKLLWQLNGRLEYCLKDRMNFDIPEEIKQLQQFQKEDAALTIYEMLQNIFAIFRQDSSSTGWNETIVENLLANVYHQINHLKTVLEEKLEKEDFTRGKLMSSLHLKRYYGRILHYLKAKEYSHCAWTIVRVEILRNFYFINRLTGYLRN

SEQ ID NO: 1141 - protein, 166 aa, Homo sapiens
MSYNLLGFLQRRSNFQCQKLLWQLNGRLEYCLKDRMNFDIPEEIKQLQQFQKEDAALTIYEMLQNIFAIFRQDSSSTGWNETIVENLLANVYHQINHLKTVLEEKLEKEDFTRGKLMSSLHLKRYYGRILHYLKAKEYSHCAWTIVRVEILRNFYFINRLTGYLRN

SEQ ID NO: 1142 - protein, 166 aa, Homo sapiens
MSYNLLGFLQRSDNFQCQKLLWQLNGRLEYCLKDRMNFDIPEEIKQLQQFQKEDAALTIYEMLQNIFAIFRQDSSSTGWNETIVENLLANVYHQINHLKTVLEEKLEKEDFTRGKLMSSLHLKRYYGRILHYLKAKEYSHCAWTIVRVEILRNFYFINRLTGYLRN

SEQ ID NO: 1143 - protein, 166 aa, Homo sapiens
MSYNLLGFLQRSENFQCQKLLWQLNGRLEYCLKDRMNFDIPEEIKQLQQFQKEDAALTIYEMLQNIFAIFRQDSSSTGWNETIVENLLANVYHQINHLKTVLEEKLEKEDFTRGKLMSSLHLKRYYGRILHYLKAKEYSHCAWTIVRVEILRNFYFINRLTGYLRN

SEQ ID NO: 1144 - protein, 166 aa, Homo sapiens
MSYNLLGFLQRSKNFQCQKLLWQLNGRLEYCLKDRMNFDIPEEIKQLQQFQKEDAALTIYEMLQNIFAIFRQDSSSTGWNETIVENLLANVYHQINHLKTVLEEKLEKEDFTRGKLMSSLHLKRYYGRILHYLKAKEYSHCAWTIVRVEILRNFYFINRLTGYLRN

SEQ ID NO: 1145 - protein, 166 aa, Homo sapiens
MSYNLLGFLQRSNNFQCQKLLWQLNGRLEYCLKDRMNFDIPEEIKQLQQFQKEDAALTIYEMLQNIFAIFRQDSSSTGWNETIVENLLANVYHQINHLKTVLEEKLEKEDFTRGKLMSSLHLKRYYGRILHYLKAKEYSHCAWTIVRVEILRNFYFINRLTGYLRN

SEQ ID NO: 1146 - protein, 166 aa, Homo sapiens
MSYNLLGFLQRSQNFQCQKLLWQLNGRLEYCLKDRMNFDIPEEIKQLQQFQKEDAALTIYEMLQNIFAIFRQDSSSTGWNETIVENLLANVYHQINHLKTVLEEKLEKEDFTRGKLMSSLHLKRYYGRILHYLKAKEYSHCAWTIVRVEILRNFYFINRLTGYLRN

SEQ ID NO: 1147 - protein, 166 aa, Homo sapiens [sequence omitted]

SEQ ID NO: 1148 - protein, 166 aa, Homo sapiens
MSYNLLGFLQRSTNFQCQKLLWQLNGRLEYCLKDRMNFDIPEEIKQLQQFQKEDAALTIYEMLQNIFAIFRQDSSSTGWNETIVENLLANVYHQINHLKTVLEEKLEKEDFTRGKLMSSLHLKRYYGRILHYLKAKEYSHCAWTIVRVEILRNFYFINRLTGYLRN

SEQ ID NO: 1149 - protein, 166 aa, Homo sapiens
MSYNLLGFLQRSSDFQCQKLLWQLNGRLEYCLKDRMNFDIPEEIKQLQQFQKEDAALTIYEMLQNIFAIFRQDSSSTGWNETIVENLLANVYHQINHLKTVLEEKLEKEDFTRGKLMSSLHLKRYYGRILHYLKAKEYSHCAWTIVRVEILRNFYFINRLTGYLRN

SEQ ID NO: 1150 - protein, 166 aa, Homo sapiens
MSYNLLGFLQRSSEFQCQKLLWQLNGRLEYCLKDRMNFDIPEEIKQLQQFQKEDAALTIYEMLQNIFAIFRQDSSSTGWNETIVENLLANVYHQINHLKTVLEEKLEKEDFTRGKLMSSLHLKRYYGRILHYLKAKEYSHCAWTIVRVEILRNFYFINRLTGYLRN

SEQ ID NO: 1151 - protein, 166 aa, Homo sapiens
MSYNLLGFLQRSSKFQCQKLLWQLNGRLEYCLKDRMNFDIPEEIKQLQQFQKEDAALTIYEMLQNIFAIFRQDSSSTGWNETIVENLLANVYHQINHLKTVLEEKLEKEDFTRGKLMSSLHLKRYYGRILHYLKAKEYSHCAWTIVRVEILRNFYFINRLTGYLRN

SEQ ID NO: 1152 - protein, 166 aa, Homo sapiens
MSYNLLGFLQRSSQFQCQKLLWQLNGRLEYCLKDRMNFDIPEEIKQLQQFQKEDAALTIYEMLQNIFAIFRQDSSSTGWNETIVENLLANVYHQINHLKTVLEEKLEKEDFTRGKLMSSLHLKRYYGRILHYLKAKEYSHCAWTIVRVEILRNFYFINRLTGYLRN

SEQ ID NO: 1153 - protein, 166 aa, Homo sapiens
MSYNLLGFLQRSSRFQCQKLLWQLNGRLEYCLKDRMNFDIPEEIKQLQQFQKEDAALTIYEMLQNIFAIFRQDSSSTGWNETIVENLLANVYHQINHLKTVLEEKLEKEDFTRGKLMSSLHLKRYYGRILHYLKAKEYSHCAWTIVRVEILRNFYFINRLTGYLRN

SEQ ID NO: 1154 - protein, 166 aa, Homo sapiens
MSYNLLGFLQRSSSFQCQKLLWQLNGRLEYCLKDRMNFDIPEEIKQLQQFQKEDAALTIYEMLQNIFAIFRQDSSSTGWNETIVENLLANVYHQINHLKTVLEEKLEKEDFTRGKLMSSLHLKRYYGRILHYLKAKEYSHCAWTIVRVEILRNFYFINRLTGYLRN

SEQ ID NO: 1155 - protein, 166 aa, Homo sapiens
MSYNLLGFLQRSSTFQCQKLLWQLNGRLEYCLKDRMNFDIPEEIKQLQQFQKEDAALTIYEMLQNIFAIFRQDSSSTGWNETIVENLLANVYHQINHLKTVLEEKLEKEDFTRGKLMSSLHLKRYYGRILHYLKAKEYSHCAWTIVRVEILRNFYFINRLTGYLRN

SEQ ID NO: 1156 - protein, 166 aa, Homo sapiens
MSYNLLGFLQRSSNDQCQKLLWQLNGRLEYCLKDRMNFDIPEEIKQLQQFQKEDAALTIYEMLQNIFAIFRQDSSSTGWNETIVENLLANVYHQINHLKTVLEEKLEKEDFTRGKLMSSLHLKRYYGRILHYLKAKEYSHCAWTIVRVEILRNFYFINRLTGYLRN

SEQ ID NO: 1157 - protein, 166 aa, Homo sapiens
MSYNLLGFLQRSSNEQCQKLLWQLNGRLEYCLKDRMNFDIPEEIKQLQQFQKEDAALTIYEMLQNIFAIFRQDSSSTGWNETIVENLLANVYHQINHLKTVLEEKLEKEDFTRGKLMSSLHLKRYYGRILHYLKAKEYSHCAWTIVRVEILRNFYFINRLTGYLRN

SEQ ID NO: 1158 - protein, 166 aa, Homo sapiens
MSYNLLGFLQRSSNKQCQKLLWQLNGRLEYCLKDRMNFDIPEEIKQLQQFQKEDAALTIYEMLQNIFAIFRQDSSSTGWNETIVENLLANVYHQINHLKTVLEEKLEKEDFTRGKLMSSLHLKRYYGRILHYLKAKEYSHCAWTIVRVEILRNFYFINRLTGYLRN

SEQ ID NO: 1159 - protein, 166 aa, Homo sapiens
MSYNLLGFLQRSSNRQCQKLLWQLNGRLEYCLKDRMNFDIPEEIKQLQQFQKEDAALTIYEMLQNIFAIFRQDSSSTGWNETIVENLLANVYHQINHLKTVLEEKLEKEDFTRGKLMSSLHLKRYYGRILHYLKAKEYSHCAWTIVRVEILRNFYFINRLTGYLRN

SEQ ID NO: 1160 - protein, 166 aa, Homo sapiens
MSYNLLGFLQRSSNFDCQKLLWQLNGRLEYCLKDRMNFDIPEEIKQLQQFQKEDAALTIYEMLQNIFAIFRQDSSSTGWNETIVENLLANVYHQINHLKTVLEEKLEKEDFTRGKLMSSLHLKRYYGRILHYLKAKEYSHCAWTIVRVEILRNFYFINRLTGYLRN

SEQ ID NO: 1161 - protein, 166 aa, Homo sapiens
MSYNLLGFLQRSSNFECQKLLWQLNGRLEYCLKDRMNFDIPEEIKQLQQFQKEDAALTIYEMLQNIFAIFRQDSSSTGWNETIVENLLANVYHQINHLKTVLEEKLEKEDFTRGKLMSSLHLKRYYGRILHYLKAKEYSHCAWTIVRVEILRNFYFINRLTGYLRN

SEQ ID NO: 1162 - protein, 166 aa, Homo sapiens
MSYNLLGFLQRSSNFKCQKLLWQLNGRLEYCLKDRMNFDIPEEIKQLQQFQKEDAALTIYEMLQNIFAIFRQDSSSTGWNETIVENLLANVYHQINHLKTVLEEKLEKEDFTRGKLMSSLHLKRYYGRILHYLKAKEYSHCAWTIVRVEILRNFYFINRLTGYLRN

SEQ ID NO: 1163 - protein, 166 aa, Homo sapiens
MSYNLLGFLQRSSNFNCQKLLWQLNGRLEYCLKDRMNFDIPEEIKQLQQFQKEDAALTIYEMLQNIFAIFRQDSSSTGWNETIVENLLANVYHQINHLKTVLEEKLEKEDFTRGKLMSSLHLKRYYGRILHYLKAKEYSHCAWTIVRVEILRNFYFINRLTGYLRN

SEQ ID NO: 1164 - protein, 166 aa, Homo sapiens
MSYNLLGFLQRSSNFRCQKLLWQLNGRLEYCLKDRMNFDIPEEIKQLQQFQKEDAALTIYEMLQNIFAIFRQDSSSTGWNETIVENLLANVYHQINHLKTVLEEKLEKEDFTRGKLMSSLHLKRYYGRILHYLKAKEYSHCAWTIVRVEILRNFYFINRLTGYLRN

SEQ ID NO: 1165 - protein, 166 aa, Homo sapiens
MSYNLLGFLQRSSNFSCQKLLWQLNGRLEYCLKDRMNFDIPEEIKQLQQFQKEDAALTIYEMLQNIFAIFRQDSSSTGWNETIVENLLANVYHQINHLKTVLEEKLEKEDFTRGKLMSSLHLKRYYGRILHYLKAKEYSHCAWTIVRVEILRNFYFINRLTGYLRN

SEQ ID NO: 1166 - protein, 166 aa, Homo sapiens
MSYNLLGFLQRSSNFTCQKLLWQLNGRLEYCLKDRMNFDIPEEIKQLQQFQKEDAALTIYEMLQNIFAIFRQDSSSTGWNETIVENLLANVYHQINHLKTVLEEKLEKEDFTRGKLMSSLHLKRYYGRILHYLKAKEYSHCAWTIVRVEILRNFYFINRLTGYLRN

SEQ ID NO: 1167 - protein, 166 aa, Homo sapiens
MSYNLLGFLQRSSNFQDQKLLWQLNGRLEYCLKDRMNFDIPEEIKQLQQFQKEDAALTIYEMLQNIFAIFRQDSSSTGWNETIVENLLANVYHQINHLKTVLEEKLEKEDFTRGKLMSSLHLKRYYGRILHYLKAKEYSHCAWTIVRVEILRNFYFINRLTGYLRN

SEQ ID NO: 1168 - protein, 166 aa, Homo sapiens
MSYNLLGFLQRSSNFQEQKLLWQLNGRLEYCLKDRMNFDIPEEIKQLQQFQKEDAALTIYEMLQNIFAIFRQDSSSTGWNETIVENLLANVYHQINHLKTVLEEKLEKEDFTRGKLMSSLHLKRYYGRILHYLKAKEYSHCAWTIVRVEILRNFYFINRLTGYLRN

SEQ ID NO: 1169 - protein, 166 aa, Homo sapiens
MSYNLLGFLQRSSNFQKQKLLWQLNGRLEYCLKDRMNFDIPEEIKQLQQFQKEDAALTIYEMLQNIFAIFRQDSSSTGWNETIVENLLANVYHQINHLKTVLEEKLEKEDFTRGKLMSSLHLKRYYGRILHYLKAKEYSHCAWTIVRVEILRNFYFINRLTGYLRN

SEQ ID NO: 1170 - protein, 166 aa, Homo sapiens
MSYNLLGFLQRSSNFQNQKLLWQLNGRLEYCLKDRMNFDIPEEIKQLQQFQKEDAALTIYEMLQNIFAIFRQDSSSTGWNETIVENLLANVYHQINHLKTVLEEKLEKEDFTRGKLMSSLHLKRYYGRILHYLKAKEYSHCAWTIVRVEILRNFYFINRLTGYLRN

SEQ ID NO: 1171 - protein, 166 aa, Homo sapiens
MSYNLLGFLQRSSNFQQQKLLWQLNGRLEYCLKDRMNFDIPEEIKQLQQFQKEDAALTIYEMLQNIFAIFRQDSSSTGWNETIVENLLANVYHQINHLKTVLEEKLEKEDFTRGKLMSSLHLKRYYGRILHYLKAKEYSHCAWTIVRVEILRNFYFINRLTGYLRN

SEQ ID NO: 1172 - protein, 166 aa, Homo sapiens
MSYNLLGFLQRSSNFQRQKLLWQLNGRLEYCLKDRMNFDIPEEIKQLQQFQKEDAALTIYEMLQNIFAIFRQDSSSTGWNETIVENLLANVYHQINHLKTVLEEKLEKEDFTRGKLMSSLHLKRYYGRILHYLKAKEYSHCAWTIVRVEILRNFYFINRLTGYLRN

SEQ ID NO: 1173 - protein, 166 aa, Homo sapiens
MSYNLLGFLQRSSNFQSQKLLWQLNGRLEYCLKDRMNFDIPEEIKQLQQFQKEDAALTIYEMLQNIFAIFRQDSSSTGWNETIVENLLANVYHQINHLKTVLEEKLEKEDFTRGKLMSSLHLKRYYGRILHYLKAKEYSHCAWTIVRVEILRNFYFINRLTGYLRN

SEQ ID NO: 1174 - protein, 166 aa, Homo sapiens
MSYNLLGFLQRSSNFQTQKLLWQLNGRLEYCLKDRMNFDIPEEIKQLQQFQKEDAALTIYEMLQNIFAIFRQDSSSTGWNETIVENLLANVYHQINHLKTVLEEKLEKEDFTRGKLMSSLHLKRYYGRILHYLKAKEYSHCAWTIVRVEILRNFYFINRLTGYLRN

SEQ ID NO: 1175 - protein, 166 aa, Homo sapiens
MSYNLLGFLQRSSNFQCQKNLWQLNGRLEYCLKDRMNFDIPEEIKQLQQFQKEDAALTIYEMLQNIFAIFRQDSSSTGWNETIVENLLANVYHQINHLKTVLEEKLEKEDFTRGKLMSSLHLKRYYGRILHYLKAKEYSHCAWTIVRVEILRNFYFINRLTGYLRN

SEQ ID NO: 1176 - protein, 166 aa, Homo sapiens
MSYNLLGFLQRSSNFQCQKQLWQLNGRLEYCLKDRMNFDIPEEIKQLQQFQKEDAALTIYEMLQNIFAIFRQDSSSTGWNETIVENLLANVYHQINHLKTVLEEKLEKEDFTRGKLMSSLHLKRYYGRILHYLKAKEYSHCAWTIVRVEILRNFYFINRLTGYLRN

SEQ ID NO: 1177 - protein, 166 aa, Homo sapiens
MSYNLLGFLQRSSNFQCQKRLWQLNGRLEYCLKDRMNFDIPEEIKQLQQFQKEDAALTIYEMLQNIFAIFRQDSSSTGWNETIVENLLANVYHQINHLKTVLEEKLEKEDFTRGKLMSSLHLKRYYGRILHYLKAKEYSHCAWTIVRVEILRNFYFINRLTGYLRN

SEQ ID NO: 1178 - protein, 166 aa, Homo sapiens
MSYNLLGFLQRSSNFQCQKSLWQLNGRLEYCLKDRMNFDIPEEIKQLQQFQKEDAALTIYEMLQNIFAIFRQDSSSTGWNETIVENLLANVYHQINHLKTVLEEKLEKEDFTRGKLMSSLHLKRYYGRILHYLKAKEYSHCAWTIVRVEILRNFYFINRLTGYLRN

SEQ ID NO: 1179 - protein, 166 aa, Homo sapiens
MSYNLLGFLQRSSNFQCQKTLWQLNGRLEYCLKDRMNFDIPEEIKQLQQFQKEDAALTIYEMLQNIFAIFRQDSSSTGWNETIVENLLANVYHQINHLKTVLEEKLEKEDFTRGKLMSSLHLKRYYGRILHYLKAKEYSHCAWTIVRVEILRNFYFINRLTGYLRN

SEQ ID NO: 1180 - protein, 166 aa, Homo sapiens
MSYNLLGFLQRSSNFQCQKDLWQLNGRLEYCLKDRMNFDIPEEIKQLQQFQKEDAALTIYEMLQNIFAIFRQDSSSTGWNETIVENLLANVYHQINHLKTVLEEKLEKEDFTRGKLMSSLHLKRYYGRILHYLKAKEYSHCAWTIVRVEILRNFYFINRLTGYLRN

SEQ ID NO: 1181 - protein, 166 aa, Homo sapiens
MSYNLLGFLQRSSNFQCQKELWQLNGRLEYCLKDRMNFDIPEEIKQLQQFQKEDAALTIYEMLQNIFAIFRQDSSSTGWNETIVENLLANVYHQINHLKTVLEEKLEKEDFTRGKLMSSLHLKRYYGRILHYLKAKEYSHCAWTIVRVEILRNFYFINRLTGYLRN

SEQ ID NO: 1182 - protein, 166 aa, Homo sapiens
MSYNLLGFLQRSSNFQCQKKLWQLNGRLEYCLKDRMNFDIPEEIKQLQQFQKEDAALTIYEMLQNIFAIFRQDSSSTGWNETIVENLLANVYHQINHLKTVLEEKLEKEDFTRGKLMSSLHLKRYYGRILHYLKAKEYSHCAWTIVRVEILRNFYFINRLTGYLRN

SEQ ID NO: 1183 - protein, 166 aa, Homo sapiens
MSYNLLGFLQRSSNFQCQKLLDQLNGRLEYCLKDRMNFDIPEEIKQLQQFQKEDAALTIYEMLQNIFAIFRQDSSSTGWNETIVENLLANVYHQINHLKTVLEEKLEKEDFTRGKLMSSLHLKRYYGRILHYLKAKEYSHCAWTIVRVEILRNFYFINRLTGYLRN

SEQ ID NO: 1184 - protein, 166 aa, Homo sapiens
MSYNLLGFLQRSSNFQCQKLLEQLNGRLEYCLKDRMNFDIPEEIKQLQQFQKEDAALTIYEMLQNIFAIFRQDSSSTGWNETIVENLLANVYHQINHLKTVLEEKLEKEDFTRGKLMSSLHLKRYYGRILHYLKAKEYSHCAWTIVRVEILRNFYFINRLTGYLRN

SEQ ID NO: 1185 - protein, 166 aa, Homo sapiens
MSYNLLGFLQRSSNFQCQKLLKQLNGRLEYCLKDRMNFDIPEEIKQLQQFQKEDAALTIYEMLQNIFAIFRQDSSSTGWNETIVENLLANVYHQINHLKTVLEEKLEKEDFTRGKLMSSLHLKRYYGRILHYLKAKEYSHCAWTIVRVEILRNFYFINRLTGYLRN

SEQ ID NO: 1186 - protein, 166 aa, Homo sapiens
MSYNLLGFLQRSSNFQCQKLLRQLNGRLEYCLKDRMNFDIPEEIKQLQQFQKEDAALTIYEMLQNIFAIFRQDSSSTGWNETIVENLLANVYHQINHLKTVLEEKLEKEDFTRGKLMSSLHLKRYYGRILHYLKAKEYSHCAWTIVRVEILRNFYFINRLTGYLRN

SEQ ID NO: 1187 - protein, 166 aa, Homo sapiens
MSYNLLGFLQRSSNFQCQKLLWDLNGRLEYCLKDRMNFDIPEEIKQLQQFQKEDAALTIYEMLQNIFAIFRQDSSSTGWNETIVENLLANVYHQINHLKTVLEEKLEKEDFTRGKLMSSLHLKRYYGRILHYLKAKEYSHCAWTIVRVEILRNFYFINRLTGYLRN

SEQ ID NO: 1188 - protein, 166 aa, Homo sapiens
MSYNLLGFLQRSSNFQCQKLLWELNGRLEYCLKDRMNFDIPEEIKQLQQFQKEDAALTIYEMLQNIFAIFRQDSSSTGWNETIVENLLANVYHQINHLKTVLEEKLEKEDFTRGKLMSSLHLKRYYGRILHYLKAKEYSHCAWTIVRVEILRNFYFINRLTGYLRN

SEQ ID NO: 1189 - protein, 166 aa, Homo sapiens
MSYNLLGFLQRSSNFQCQKLLWKLNGRLEYCLKDRMNFDIPEEIKQLQQFQKEDAALTIYEMLQNIFAIFRQDSSSTGWNETIVENLLANVYHQINHLKTVLEEKLEKEDFTRGKLMSSLHLKRYYGRILHYLKAKEYSHCAWTIVRVEILRNFYFINRLTGYLRN

SEQ ID NO: 1190 - protein, 166 aa, Homo sapiens
MSYNLLGFLQRSSNFQCQKLLWRLNGRLEYCLKDRMNFDIPEEIKQLQQFQKEDAALTIYEMLQNIFAIFRQDSSSTGWNETIVENLLANVYHQINHLKTVLEEKLEKEDFTRGKLMSSLHLKRYYGRILHYLKAKEYSHCAWTIVRVEILRNFYFINRLTGYLRN

SEQ ID NO: 1191 - protein, 166 aa, Homo sapiens
MSYNLLGFLQRSSNFQCQKLLWQDNGRLEYCLKDRMNFDIPEEIKQLQQFQKEDAALTIYEMLQNIFAIFRQDSSSTGWNETIVENLLANVYHQINHLKTVLEEKLEKEDFTRGKLMSSLHLKRYYGRILHYLKAKEYSHCAWTIVRVEILRNFYFINRLTGYLRN

SEQ ID NO: 1192 - protein, 166 aa, Homo sapiens
MSYNLLGFLQRSSNFQCQKLLWQENGRLEYCLKDRMNFDIPEEIKQLQQFQKEDAALTIYEMLQNIFAIFRQDSSSTGWNETIVENLLANVYHQINHLKTVLEEKLEKEDFTRGKLMSSLHLKRYYGRILHYLKAKEYSHCAWTIVRVEILRNFYFINRLTGYLRN

SEQ ID NO: 1193 - protein, 166 aa, Homo sapiens
MSYNLLGFLQRSSNFQCQKLLWQKNGRLEYCLKDRMNFDIPEEIKQLQQFQKEDAALTIYEMLQNIFAIFRQDSSSTGWNETIVENLLANVYHQINHLKTVLEEKLEKEDFTRGKLMSSLHLKRYYGRILHYLKAKEYSHCAWTIVRVEILRNFYFINRLTGYLRN

SEQ ID NO: 1194 - protein, 166 aa, Homo sapiens
MSYNLLGFLQRSSNFQCQKLLWQRNGRLEYCLKDRMNFDIPEEIKQLQQFQKEDAALTIYEMLQNIFAIFRQDSSSTGWNETIVENLLANVYHQINHLKTVLEEKLEKEDFTRGKLMSSLHLKRYYGRILHYLKAKEYSHCAWTIVRVEILRNFYFINRLTGYLRN

SEQ ID NO: 1195 - protein, 166 aa, Homo sapiens
MSYNLLGFLQRSSNFQCQKLLWQLNGRLEYCLKDRMNFDIPEEIKQLQQFQKEDAALTIYEMLQNIFAIFRQDSSSTDWNETIVENLLANVYHQINHLKTVLEEKLEKEDFTRGKLMSSLHLKRYYGRILHYLKAKEYSHCAWTIVRVEILRNFYFINRLTGYLRN

SEQ ID NO: 1196 - protein, 166 aa, Homo sapiens
MSYNLLGFLQRSSNFQCQKLLWQLNGRLEYCLKDRMNFDIPEEIKQLQQFQKEDAALTIYEMLQNIFAIFRQDSSSTEWNETIVENLLANVYHQINHLKTVLEEKLEKEDFTRGKLMSSLHLKRYYGRILHYLKAKEYSHCAWTIVRVEILRNFYFINRLTGYLRN

SEQ ID NO: 1197 - protein, 166 aa, Homo sapiens
MSYNLLGFLQRSSNFQCQKLLWQLNGRLEYCLKDRMNFDIPEEIKQLQQFQKEDAALTIYEMLQNIFAIFRQDSSSTKWNETIVENLLANVYHQINHLKTVLEEKLEKEDFTRGKLMSSLHLKRYYGRILHYLKAKEYSHCAWTIVRVEILRNFYFINRLTGYLRN

SEQ ID NO: 1198 - protein, 166 aa, Homo sapiens
MSYNLLGFLQRSSNFQCQKLLWQLNGRLEYCLKDRMNFDIPEEIKQLQQFQKEDAALTIYEMLQNIFAIFRQDSSSTRWNETIVENLLANVYHQINHLKTVLEEKLEKEDFTRGKLMSSLHLKRYYGRILHYLKAKEYSHCAWTIVRVEILRNFYFINRLTGYLRN

SEQ ID NO: 1199 - protein, 166 aa, Homo sapiens
MSYNLLGFLQRSSNFQCQKLLWQLNGRLEYCLKDRMNFDIPEEIKQLQQFQKEDAALTIYEMLQNIFAIFRQDSSSTGDNETIVENLLANVYHQINHLKTVLEEKLEKEDFTRGKLMSSLHLKRYYGRILHYLKAKEYSHCAWTIVRVEILRNFYFINRLTGYLRN

SEQ ID NO: 1200 - protein, 166 aa, Homo sapiens
MSYNLLGFLQRSSNFQCQKLLWQLNGRLEYCLKDRMNFDIPEEIKQLQQFQKEDAALTIYEMLQNIFAIFRQDSSSTGENETIVENLLANVYHQINHLKTVLEEKLEKEDFTRGKLMSSLHLKRYYGRILHYLKAKEYSHCAWTIVRVEILRNFYFINRLTGYLRN

SEQ ID NO: 1201 - protein, 166 aa, Homo sapiens
MSYNLLGFLQRSSNFQCQKLLWQLNGRLEYCLKDRMNFDIPEEIKQLQQFQKEDAALTIYEMLQNIFAIFRQDSSSTGKNETIVENLLANVYHQINHLKTVLEEKLEKEDFTRGKLMSSLHLKRYYGRILHYLKAKEYSHCAWTIVRVEILRNFYFINRLTGYLRN

SEQ ID NO: 1202 - protein, 166 aa, Homo sapiens
MSYNLLGFLQRSSNFQCQKLLWQLNGRLEYCLKDRMNFDIPEEIKQLQQFQKEDAALTIYEMLQNIFAIFRQDSSSTGRNETIVENLLANVYHQINHLKTVLEEKLEKEDFTRGKLMSSLHLKRYYGRILHYLKAKEYSHCAWTIVRVEILRNFYFINRLTGYLRN

SEQ ID NO: 1203 - protein, 166 aa, Homo sapiens
MSYNLLGFLQRSSNFQCQKLLWQLNGRLEYCLKDRMNFDIPEEIKQLQQFQKEDAALTIYEMLQNIFAIFRQDSSSTGWDETIVENLLANVYHQINHLKTVLEEKLEKEDFTRGKLMSSLHLKRYYGRILHYLKAKEYSHCAWTIVRVEILRNFYFINRLTGYLRN

SEQ ID NO: 1204 - protein, 166 aa, Homo sapiens
MSYNLLGFLQRSSNFQCQKLLWQLNGRLEYCLKDRMNFDIPEEIKQLQQFQKEDAALTIYEMLQNIFAIFRQDSSSTGWEETIVENLLANVYHQINHLKTVLEEKLEKEDFTRGKLMSSLHLKRYYGRILHYLKAKEYSHCAWTIVRVEILRNFYFINRLTGYLRN

SEQ ID NO: 1205 - protein, 166 aa, Homo sapiens
MSYNLLGFLQRSSNFQCQKLLWQLNGRLEYCLKDRMNFDIPEEIKQLQQFQKEDAALTIYEMLQNIFAIFRQDSSSTGWKETIVENLLANVYHQINHLKTVLEEKLEKEDFTRGKLMSSLHLKRYYGRILHYLKAKEYSHCAWTIVRVEILRNFYFINRLTGYLRN

SEQ ID NO: 1206 - protein, 166 aa, Homo sapiens
MSYNLLGFLQRSSNFQCQKLLWQLNGRLEYCLKDRMNFDIPEEIKQLQQFQKEDAALTIYEMLQNIFAIFRQDSSSTGWRETIVENLLANVYHQINHLKTVLEEKLEKEDFTRGKLMSSLHLKRYYGRILHYLKAKEYSHCAWTIVRVEILRNFYFINRLTGYLRN

SEQ ID NO: 1207 - protein, 166 aa, Homo sapiens
MSYNLLGFLQRSSNFQCQKLLWQLNGRLEYCLKDRMNFDIPEEIKQLQQFQKEDAALTIYEMLQNIFAIFRQDSSSTGWNEDIVENLLANVYHQINHLKTVLEEKLEKEDFTRGKLMSSLHLKRYYGRILHYLKAKEYSHCAWTIVRVEILRNFYFINRLTGYLRN

SEQ ID NO: 1208 - protein, 166 aa, Homo sapiens
MSYNLLGFLQRSSNFQCQKLLWQLNGRLEYCLKDRMNFDIPEEIKQLQQFQKEDAALTIYEMLQNIFAIFRQDSSSTGWNEEIVENLLANVYHQINHLKTVLEEKLEKEDFTRGKLMSSLHLKRYYGRILHYLKAKEYSHCAWTIVRVEILRNFYFINRLTGYLRN

SEQ ID NO: 1209 - protein, 166 aa, Homo sapiens
MSYNLLGFLQRSSNFQCQKLLWQLNGRLEYCLKDRMNFDIPEEIKQLQQFQKEDAALTIYEMLQNIFAIFRQDSSSTGWNEKIVENLLANVYHQINHLKTVLEEKLEKEDFTRGKLMSSLHLKRYYGRILHYLKAKEYSHCAWTIVRVEILRNFYFINRLTGYLRN

SEQ ID NO: 1210 - protein, 166 aa, Homo sapiens
MSYNLLGFLQRSSNFQCQKLLWQLNGRLEYCLKDRMNFDIPEEIKQLQQFQKEDAALTIYEMLQNIFAIFRQDSSSTGWNERIVENLLANVYHQINHLKTVLEEKLEKEDFTRGKLMSSLHLKRYYGRILHYLKAKEYSHCAWTIVRVEILRNFYFINRLTGYLRN

SEQ ID NO: 1211 - protein, 166 aa, Homo sapiens
MSYNLLGFLQRSSNFQCQKLLWQLNGRLEYCLKDRMNFDIPEEIKQLQQFQKEDAALTIYEMLQNIFAIFRQDSSSTGWNETDVENLLANVYHQINHLKTVLEEKLEKEDFTRGKLMSSLHLKRYYGRILHYLKAKEYSHCAWTIVRVEILRNFYFINRLTGYLRN

SEQ ID NO: 1212 - protein, 166 aa, Homo sapiens
MSYNLLGFLQRSSNFQCQKLLWQLNGRLEYCLKDRMNFDIPEEIKQLQQFQKEDAALTIYEMLQNIFAIFRQDSSSTGWNETEVENLLANVYHQINHLKTVLEEKLEKEDFTRGKLMSSLHLKRYYGRILHYLKAKEYSHCAWTIVRVEILRNFYFINRLTGYLRN

SEQ ID NO: 1213 - protein, 166 aa, Homo sapiens
MSYNLLGFLQRSSNFQCQKLLWQLNGRLEYCLKDRMNFDIPEEIKQLQQFQKEDAALTIYEMLQNIFAIFRQDSSSTGWNETKVENLLANVYHQINHLKTVLEEKLEKEDFTRGKLMSSLHLKRYYGRILHYLKAKEYSHCAWTIVRVEILRNFYFINRLTGYLRN

SEQ ID NO: 1214 - protein, 166 aa, Homo sapiens
MSYNLLGFLQRSSNFQCQKLLWQLNGRLEYCLKDRMNFDIPEEIKQLQQFQKEDAALTIYEMLQNIFAIFRQDSSSTGWNETRVENLLANVYHQINHLKTVLEEKLEKEDFTRGKLMSSLHLKRYYGRILHYLKAKEYSHCAWTIVRVEILRNFYFINRLTGYLRN

SEQ ID NO: 1215 - protein, 166 aa, Homo sapiens
MSYNLLGFLQRSSNFQCQKLLWQLNGRLEYCLKDRMNFDIPEEIKQLQQFQKEDAALTIYEMLQNIFAIFRQDSSSTGWNETNVENLLANVYHQINHLKTVLEEKLEKEDFTRGKLMSSLHLKRYYGRILHYLKAKEYSHCAWTIVRVEILRNFYFINRLTGYLRN

SEQ ID NO: 1216 - protein, 166 aa, Homo sapiens
MSYNLLGFLQRSSNFQCQKLLWQLNGRLEYCLKDRMNFDIPEEIKQLQQFQKEDAALTIYEMLQNIFAIFRQDSSSTGWNETQVENLLANVYHQINHLKTVLEEKLEKEDFTRGKLMSSLHLKRYYGRILHYLKAKEYSHCAWTIVRVEILRNFYFINRLTGYLRN

SEQ ID NO: 1217 - protein, 166 aa, Homo sapiens
MSYNLLGFLQRSSNFQCQKLLWQLNGRLEYCLKDRMNFDIPEEIKQLQQFQKEDAALTIYEMLQNIFAIFRQDSSSTGWNETSVENLLANVYHQINHLKTVLEEKLEKEDFTRGKLMSSLHLKRYYGRILHYLKAKEYSHCAWTIVRVEILRNFYFINRLTGYLRN

SEQ ID NO: 1218 - protein, 166 aa, Homo sapiens
MSYNLLGFLQRSSNFQCQKLLWQLNGRLEYCLKDRMNFDIPEEIKQLQQFQKEDAALTIYEMLQNIFAIFRQDSSSTGWNETTVENLLANVYHQINHLKTVLEEKLEKEDFTRGKLMSSLHLKRYYGRILHYLKAKEYSHCAWTIVRVEILRNFYFINRLTGYLRN

SEQ ID NO: 1219 - protein, 166 aa, Homo sapiens
MSYNLLGFLQRSSNFQCQKLLWQLNGRLEYCLKDRMNFDIPEEIKQLQQFQKEDAALTIYEMLQNIFAIFRQDSSSTGWNETIVEDLLANVYHQINHLKTVLEEKLEKEDFTRGKLMSSLHLKRYYGRILHYLKAKEYSHCAWTIVRVEILRNFYFINRLTGYLRN

SEQ ID NO: 1220 - protein, 166 aa, Homo sapiens
MSYNLLGFLQRSSNFQCQKLLWQLNGRLEYCLKDRMNFDIPEEIKQLQQFQKEDAALTIYEMLQNIFAIFRQDSSSTGWNETIVEELLANVYHQINHLKTVLEEKLEKEDFTRGKLMSSLHLKRYYGRILHYLKAKEYSHCAWTIVRVEILRNFYFINRLTGYLRN

SEQ ID NO: 1221 - protein, 166 aa, Homo sapiens
MSYNLLGFLQRSSNFQCQKLLWQLNGRLEYCLKDRMNFDIPEEIKQLQQFQKEDAALTIYEMLQNIFAIFRQDSSSTGWNETIVEKLLANVYHQINHLKTVLEEKLEKEDFTRGKLMSSLHLKRYYGRILHYLKAKEYSHCAWTIVRVEILRNFYFINRLTGYLRN

SEQ ID NO: 1222 - protein, 166 aa, Homo sapiens
MSYNLLGFLQRSSNFQCQKLLWQLNGRLEYCLKDRMNFDIPEEIKQLQQFQKEDAALTIYEMLQNIFAIFRQDSSSTGWNETIVERLLANVYHQINHLKTVLEEKLEKEDFTRGKLMSSLHLKRYYGRILHYLKAKEYSHCAWTIVRVEILRNFYFINRLTGYLRN

SEQ ID NO: 1223 - protein, 166 aa, Homo sapiens
MSYNLLGFLQRSSNFQCQKLLWQLNGRLEYCLKDRMNFDIPEEIKQLQQFQKEDAALTIYEMLQNIFAIFRQDSSSTGWNETIVEQLLANVYHQINHLKTVLEEKLEKEDFTRGKLMSSLHLKRYYGRILHYLKAKEYSHCAWTIVRVEILRNFYFINRLTGYLRN

SEQ ID NO: 1224 - protein, 166 aa, Homo sapiens
MSYNLLGFLQRSSNFQCQKLLWQLNGRLEYCLKDRMNFDIPEEIKQLQQFQKEDAALTIYEMLQNIFAIFRQDSSSTGWNETIVESLLANVYHQINHLKTVLEEKLEKEDFTRGKLMSSLHLKRYYGRILHYLKAKEYSHCAWTIVRVEILRNFYFINRLTGYLRN

SEQ ID NO: 1225 - protein, 166 aa, Homo sapiens
MSYNLLGFLQRSSNFQCQKLLWQLNGRLEYCLKDRMNFDIPEEIKQLQQFQKEDAALTIYEMLQNIFAIFRQDSSSTGWNETIVETLLANVYHQINHLKTVLEEKLEKEDFTRGKLMSSLHLKRYYGRILHYLKAKEYSHCAWTIVRVEILRNFYFINRLTGYLRN

SEQ ID NO: 1226 - protein, 166 aa, Homo sapiens
MSYNLLGFLQRSSNFQCQKLLWQLNGRLEYCLKDRMNFDIPEEIKQLQQFQKEDAALTIYEMLQNIFAIFRQDSSSTGWNETIVENDLANVYHQINHLKTVLEEKLEKEDFTRGKLMSSLHLKRYYGRILHYLKAKEYSHCAWTIVRVEILRNFYFINRLTGYLRN

SEQ ID NO: 1227 - protein, 166 aa, Homo sapiens
MSYNLLGFLQRSSNFQCQKLLWQLNGRLEYCLKDRMNFDIPEEIKQLQQFQKEDAALTIYEMLQNIFAIFRQDSSSTGWNETIVENELANVYHQINHLKTVLEEKLEKEDFTRGKLMSSLHLKRYYGRILHYLKAKEYSHCAWTIVRVEILRNFYFINRLTGYLRN

SEQ ID NO: 1228 - protein, 166 aa, Homo sapiens
MSYNLLGFLQRSSNFQCQKLLWQLNGRLEYCLKDRMNFDIPEEIKQLQQFQKEDAALTIYEMLQNIFAIFRQDSSSTGWNETIVENKLANVYHQINHLKTVLEEKLEKEDFTRGKLMSSLHLKRYYGRILHYLKAKEYSHCAWTIVRVEILRNFYFINRLTGYLRN

SEQ ID NO: 1229 - protein, 166 aa, Homo sapiens
MSYNLLGFLQRSSNFQCQKLLWQLNGRLEYCLKDRMNFDIPEEIKQLQQFQKEDAALTIYEMLQNIFAIFRQDSSSTGWNETIVENRLANVYHQINHLKTVLEEKLEKEDFTRGKLMSSLHLKRYYGRILHYLKAKEYSHCAWTIVRVEILRNFYFINRLTGYLRN

SEQ ID NO: 1230 - protein, 166 aa, Homo sapiens
MSYNLLGFLQRSSNFQCQKLLWQLNGRLEYCLKDRMNFDIPEEIKQLQQFQKEDAALTIYEMLQNIFAIFRQDSSSTGWNETIVENNLANVYHQINHLKTVLEEKLEKEDFTRGKLMSSLHLKRYYGRILHYLKAKEYSHCAWTIVRVEILRNFYFINRLTGYLRN

SEQ ID NO: 1231 - protein, 166 aa, Homo sapiens
MSYNLLGFLQRSSNFQCQKLLWQLNGRLEYCLKDRMNFDIPEEIKQLQQFQKEDAALTIYEMLQNIFAIFRQDSSSTGWNETIVENQLANVYHQINHLKTVLEEKLEKEDFTRGKLMSSLHLKRYYGRILHYLKAKEYSHCAWTIVRVEILRNFYFINRLTGYLRN

SEQ ID NO: 1232 - protein, 166 aa, Homo sapiens
MSYNLLGFLQRSSNFQCQKLLWQLNGRLEYCLKDRMNFDIPEEIKQLQQFQKEDAALTIYEMLQNIFAIFRQDSSSTGWNETIVENSLANVYHQINHLKTVLEEKLEKEDFTRGKLMSSLHLKRYYGRILHYLKAKEYSHCAWTIVRVEILRNFYFINRLTGYLRN

SEQ ID NO: 1233 - protein, 166 aa, Homo sapiens
MSYNLLGFLQRSSNFQCQKLLWQLNGRLEYCLKDRMNFDIPEEIKQLQQFQKEDAALTIYEMLQNIFAIFRQDSSSTGWNETIVENTLANVYHQINHLKTVLEEKLEKEDFTRGKLMSSLHLKRYYGRILHYLKAKEYSHCAWTIVRVEILRNFYFINRLTGYLRN

SEQ ID NO: 1234 - protein, 166 aa, Homo sapiens
MSYNLLGFLQRSSNFQCQKLLWQLNGRLEYCLKDRMNFDIPEEIKQLQQFQKEDAALTIYEMLQNIFAIFRQDSSSTGWNETIVENLLDNVYHQINHLKTVLEEKLEKEDFTRGKLMSSLHLKRYYGRILHYLKAKEYSHCAWTIVRVEILRNFYFINRLTGYLRN

SEQ ID NO: 1235 - protein, 166 aa, Homo sapiens
MSYNLLGFLQRSSNFQCQKLLWQLNGRLEYCLKDRMNFDIPEEIKQLQQFQKEDAALTIYEMLQNIFAIFRQDSSSTGWNETIVENLLENVYHQINHLKTVLEEKLEKEDFTRGKLMSSLHLKRYYGRILHYLKAKEYSHCAWTIVRVEILRNFYFINRLTGYLRN

SEQ ID NO: 1236 - protein, 166 aa, Homo sapiens
MSYNLLGFLQRSSNFQCQKLLWQLNGRLEYCLKDRMNFDIPEEIKQLQQFQKEDAALTIYEMLQNIFAIFRQDSSSTGWNETIVENLLKNVYHQINHLKTVLEEKLEKEDFTRGKLMSSLHLKRYYGRILHYLKAKEYSHCAWTIVRVEILRNFYFINRLTGYLRN

SEQ ID NO: 1237 - protein, 166 aa, Homo sapiens
MSYNLLGFLQRSSNFQCQKLLWQLNGRLEYCLKDRMNFDIPEEIKQLQQFQKEDAALTIYEMLQNIFAIFRQDSSSTGWNETIVENLLRNVYHQINHLKTVLEEKLEKEDFTRGKLMSSLHLKRYYGRILHYLKAKEYSHCAWTIVRVEILRNFYFINRLTGYLRN

SEQ ID NO: 1238 - protein, 166 aa, Homo sapiens
MSYNLLGFLQRSSNFQCQKLLWQLNGRLEYCLKDRMNFDIPEEIKQLQQFQKEDAALTIYEMLQNIFAIFRQDSSSTGWNETIVENLLADVYHQINHLKTVLEEKLEKEDFTRGKLMSSLHLKRYYGRILHYLKAKEYSHCAWTIVRVEILRNFYFINRLTGYLRN

SEQ ID NO: 1239 - protein, 166 aa, Homo sapiens
MSYNLLGFLQRSSNFQCQKLLWQLNGRLEYCLKDRMNFDIPEEIKQLQQFQKEDAALTIYEMLQNIFAIFRQDSSSTGWNETIVENLLAEVYHQINHLKTVLEEKLEKEDFTRGKLMSSLHLKRYYGRILHYLKAKEYSHCAWTIVRVEILRNFYFINRLTGYLRN

SEQ ID NO: 1240 - protein, 166 aa, Homo sapiens
MSYNLLGFLQRSSNFQCQKLLWQLNGRLEYCLKDRMNFDIPEEIKQLQQFQKEDAALTIYEMLQNIFAIFRQDSSSTGWNETIVENLLAKVYHQINHLKTVLEEKLEKEDFTRGKLMSSLHLKRYYGRILHYLKAKEYSHCAWTIVRVEILRNFYFINRLTGYLRN

SEQ ID NO: 1241 - protein, 166 aa, Homo sapiens
MSYNLLGFLQRSSNFQCQKLLWQLNGRLEYCLKDRMNFDIPEEIKQLQQFQKEDAALTIYEMLQNIFAIFRQDSSSTGWNETIVENLLAQVYHQINHLKTVLEEKLEKEDFTRGKLMSSLHLKRYYGRILHYLKAKEYSHCAWTIVRVEILRNFYFINRLTGYLRN

SEQ ID NO: 1242 - protein, 166 aa, Homo sapiens
MSYNLLGFLQRSSNFQCQKLLWQLNGRLEYCLKDRMNFDIPEEIKQLQQFQKEDAALTIYEMLQNIFAIFRQDSSSTGWNETIVENLLARVYHQINHLKTVLEEKLEKEDFTRGKLMSSLHLKRYYGRILHYLKAKEYSHCAWTIVRVEILRNFYFINRLTGYLRN

SEQ ID NO: 1243 - protein, 166 aa, Homo sapiens
MSYNLLGFLQRSSNFQCQKLLWQLNGRLEYCLKDRMNFDIPEEIKQLQQFQKEDAALTIYEMLQNIFAIFRQDSSSTGWNETIVENLLASVYHQINHLKTVLEEKLEKEDFTRGKLMSSLHLKRYYGRILHYLKAKEYSHCAWTIVRVEILRNFYFINRLTGYLRN

SEQ ID NO: 1244 - protein, 166 aa, Homo sapiens
MSYNLLGFLQRSSNFQCQKLLWQLNGRLEYCLKDRMNFDIPEEIKQLQQFQKEDAALTIYEMLQNIFAIFRQDSSSTGWNETIVENLLATVYHQINHLKTVLEEKLEKEDFTRGKLMSSLHLKRYYGRILHYLKAKEYSHCAWTIVRVEILRNFYFINRLTGYLRN

SEQ ID NO: 1245 - protein, 166 aa, Homo sapiens
MSYNLLGFLQRSSNFQCQKLLWQLNGRLEYCLKDRMNFDIPEEIKQLQQFQKEDAALTIYEMLQNIFAIFRQDSSSTGWNETIVENLLANDYHQINHLKTVLEEKLEKEDFTRGKLMSSLHLKRYYGRILHYLKAKEYSHCAWTIVRVEILRNFYFINRLTGYLRN

SEQ ID NO: 1246 - protein, 166 aa, Homo sapiens
MSYNLLGFLQRSSNFQCQKLLWQLNGRLEYCLKDRMNFDIPEEIKQLQQFQKEDAALTIYEMLQNIFAIFRQDSSSTGWNETIVENLLANEYHQINHLKTVLEEKLEKEDFTRGKLMSSLHLKRYYGRILHYLKAKEYSHCAWTIVRVEILRNFYFINRLTGYLRN

SEQ ID NO: 1247 - protein, 166 aa, Homo sapiens
MSYNLLGFLQRSSNFQCQKLLWQLNGRLEYCLKDRMNFDIPEEIKQLQQFQKEDAALTIYEMLQNIFAIFRQDSSSTGWNETIVENLLANKYHQINHLKTVLEEKLEKEDFTRGKLMSSLHLKRYYGRILHYLKAKEYSHCAWTIVRVEILRNFYFINRLTGYLRN

SEQ ID NO: 1248 - protein, 166 aa, Homo sapiens
MSYNLLGFLQRSSNFQCQKLLWQLNGRLEYCLKDRMNFDIPEEIKQLQQFQKEDAALTIYEMLQNIFAIFRQDSSSTGWNETIVENLLANNYHQINHLKTVLEEKLEKEDFTRGKLMSSLHLKRYYGRILHYLKAKEYSHCAWTIVRVEILRNFYFINRLTGYLRN

SEQ ID NO: 1249 - protein, 166 aa, Homo sapiens
MSYNLLGFLQRSSNFQCQKLLWQLNGRLEYCLKDRMNFDIPEEIKQLQQFQKEDAALTIYEMLQNIFAIFRQDSSSTGWNETIVENLLANQYHQINHLKTVLEEKLEKEDFTRGKLMSSLHLKRYYGRILHYLKAKEYSHCAWTIVRVEILRNFYFINRLTGYLRN

SEQ ID NO: 1250 - protein, 166 aa, Homo sapiens
MSYNLLGFLQRSSNFQCQKLLWQLNGRLEYCLKDRMNFDIPEEIKQLQQFQKEDAALTIYEMLQNIFAIFRQDSSSTGWNETIVENLLANRYHQINHLKTVLEEKLEKEDFTRGKLMSSLHLKRYYGRILHYLKAKEYSHCAWTIVRVEILRNFYFINRLTGYLRN

SEQ ID NO: 1251 - protein, 166 aa, Homo sapiens
MSYNLLGFLQRSSNFQCQKLLWQLNGRLEYCLKDRMNFDIPEEIKQLQQFQKEDAALTIYEMLQNIFAIFRQDSSSTGWNETIVENLLANSYHQINHLKTVLEEKLEKEDFTRGKLMSSLHLKRYYGRILHYLKAKEYSHCAWTIVRVEILRNFYFINRLTGYLRN

SEQ ID NO: 1252 - protein, 166 aa, Homo sapiens
MSYNLLGFLQRSSNFQCQKLLWQLNGRLEYCLKDRMNFDIPEEIKQLQQFQKEDAALTIYEMLQNIFAIFRQDSSSTGWNETIVENLLANTYHQINHLKTVLEEKLEKEDFTRGKLMSSLHLKRYYGRILHYLKAKEYSHCAWTIVRVEILRNFYFINRLTGYLRN

SEQ ID NO: 1253 - protein, 166 aa, Homo sapiens
MSYNLLGFLQRSSNFQCQKLLWQLNGRLEYCLKDRMNFDIPEEIKQLQQFQKEDAALTIYEMLQNIFAIFRQDSSSTGWNETIVENLLANVYHDINHLKTVLEEKLEKEDFTRGKLMSSLHLKRYYGRILHYLKAKEYSHCAWTIVRVEILRNFYFINRLTGYLRN

SEQ ID NO: 1254 - protein, 166 aa, Homo sapiens
MSYNLLGFLQRSSNFQCQKLLWQLNGRLEYCLKDRMNFDIPEEIKQLQQFQKEDAALTIYEMLQNIFAIFRQDSSSTGWNETIVENLLANVYHEINHLKTVLEEKLEKEDFTRGKLMSSLHLKRYYGRILHYLKAKEYSHCAWTIVRVEILRNFYFINRLTGYLRN

SEQ ID NO: 1255 - protein, 166 aa, Homo sapiens
MSYNLLGFLQRSSNFQCQKLLWQLNGRLEYCLKDRMNFDIPEEIKQLQQFQKEDAALTIYEMLQNIFAIFRQDSSSTGWNETIVENLLANVYHKINHLKTVLEEKLEKEDFTRGKLMSSLHLKRYYGRILHYLKAKEYSHCAWTIVRVEILRNFYFINRLTGYLRN

SEQ ID NO: 1256 - protein, 166 aa, Homo sapiens
MSYNLLGFLQRSSNFQCQKLLWQLNGRLEYCLKDRMNFDIPEEIKQLQQFQKEDAALTIYEMLQNIFAIFRQDSSSTGWNETIVENLLANVYHNINHLKTVLEEKLEKEDFTRGKLMSSLHLKRYYGRILHYLKAKEYSHCAWTIVRVEILRNFYFINRLTGYLRN

SEQ ID NO: 1257 - protein, 166 aa, Homo sapiens
MSYNLLGFLQRSSNFQCQKLLWQLNGRLEYCLKDRMNFDIPEEIKQLQQFQKEDAALTIYEMLQNIFAIFRQDSSSTGWNETIVENLLANVYHRINHLKTVLEEKLEKEDFTRGKLMSSLHLKRYYGRILHYLKAKEYSHCAWTIVRVEILRNFYFINRLTGYLRN

SEQ ID NO: 1258 - protein, 166 aa, Homo sapiens
MSYNLLGFLQRSSNFQCQKLLWQLNGRLEYCLKDRMNFDIPEEIKQLQQFQKEDAALTIYEMLQNIFAIFRQDSSSTGWNETIVENLLANVYHSINHLKTVLEEKLEKEDFTRGKLMSSLHLKRYYGRILHYLKAKEYSHCAWTIVRVEILRNFYFINRLTGYLRN

SEQ ID NO: 1259 - protein, 166 aa, Homo sapiens
MSYNLLGFLQRSSNFQCQKLLWQLNGRLEYCLKDRMNFDIPEEIKQLQQFQKEDAALTIYEMLQNIFAIFRQDSSSTGWNETIVENLLANVYHTINHLKTVLEEKLEKEDFTRGKLMSSLHLKRYYGRILHYLKAKEYSHCAWTIVRVEILRNFYFINRLTGYLRN

SEQ ID NO: 1260 - protein, 166 aa, Homo sapiens
MSYNLLGFLQRSSNFQCQKLLWQLNGRLEYCLKDRMNFDIPEEIKQLQQFQKEDAALTIYEMLQNIFAIFRQDSSSTGWNETIVENLLANVYHQDNHLKTVLEEKLEKEDFTRGKLMSSLHLKRYYGRILHYLKAKEYSHCAWTIVRVEILRNFYFINRLTGYLRN

SEQ ID NO: 1261 - protein, 166 aa, Homo sapiens
MSYNLLGFLQRSSNFQCQKLLWQLNGRLEYCLKDRMNFDIPEEIKQLQQFQKEDAALTIYEMLQNIFAIFRQDSSSTGWNETIVENLLANVYHQENHLKTVLEEKLEKEDFTRGKLMSSLHLKRYYGRILHYLKAKEYSHCAWTIVRVEILRNFYFINRLTGYLRN

SEQ ID NO: 1262 - protein, 166 aa, Homo sapiens
MSYNLLGFLQRSSNFQCQKLLWQLNGRLEYCLKDRMNFDIPEEIKQLQQFQKEDAALTIYEMLQNIFAIFRQDSSSTGWNETIVENLLANVYHQKNHLKTVLEEKLEKEDFTRGKLMSSLHLKRYYGRILHYLKAKEYSHCAWTIVRVEILRNFYFINRLTGYLRN

SEQ ID NO: 1263 - protein, 166 aa, Homo sapiens
MSYNLLGFLQRSSNFQCQKLLWQLNGRLEYCLKDRMNFDIPEEIKQLQQFQKEDAALTIYEMLQNIFAIFRQDSSSTGWNETIVENLLANVYHQNNHLKTVLEEKLEKEDFTRGKLMSSLHLKRYYGRILHYLKAKEYSHCAWTIVRVEILRNFYFINRLTGYLRN

SEQ ID NO: 1264 - protein, 166 aa, Homo sapiens
MSYNLLGFLQRSSNFQCQKLLWQLNGRLEYCLKDRMNFDIPEEIKQLQQFQKEDAALTIYEMLQNIFAIFRQDSSSTGWNETIVENLLANVYHQQNHLKTVLEEKLEKEDFTRGKLMSSLHLKRYYGRILHYLKAKEYSHCAWTIVRVEILRNFYFINRLTGYLRN

SEQ ID NO: 1265 - protein, 166 aa, Homo sapiens
MSYNLLGFLQRSSNFQCQKLLWQLNGRLEYCLKDRMNFDIPEEIKQLQQFQKEDAALTIYEMLQNIFAIFRQDSSSTGWNETIVENLLANVYHQRNHLKTVLEEKLEKEDFTRGKLMSSLHLKRYYGRILHYLKAKEYSHCAWTIVRVEILRNFYFINRLTGYLRN

SEQ ID NO: 1266 - protein, 166 aa, Homo sapiens
MSYNLLGFLQRSSNFQCQKLLWQLNGRLEYCLKDRMNFDIPEEIKQLQQFQKEDAALTIYEMLQNIFAIFRQDSSSTGWNETIVENLLANVYHQSNHLKTVLEEKLEKEDFTRGKLMSSLHLKRYYGRILHYLKAKEYSHCAWTIVRVEILRNFYFINRLTGYLRN

SEQ ID NO: 1267 - protein, 166 aa, Homo sapiens
MSYNLLGFLQRSSNFQCQKLLWQLNGRLEYCLKDRMNFDIPEEIKQLQQFQKEDAALTIYEMLQNIFAIFRQDSSSTGWNETIVENLLANVYHQTNHLKTVLEEKLEKEDFTRGKLMSSLHLKRYYGRILHYLKAKEYSHCAWTIVRVEILRNFYFINRLTGYLRN

SEQ ID NO: 1268 - protein, 166 aa, Homo sapiens
MSYNLLGFLQRSSNFQCQKLLWQLNGRLEYCLKDRMNFDIPEEIKQLQQFQKEDAALTIYEMLQNIFAIFRQDSSSTGWNETIVENLLANVYHQINDLKTVLEEKLEKEDFTRGKLMSSLHLKRYYGRILHYLKAKEYSHCAWTIVRVEILRNFYFINRLTGYLRN

SEQ ID NO: 1269 - protein, 166 aa, Homo sapiens
MSYNLLGFLQRSSNFQCQKLLWQLNGRLEYCLKDRMNFDIPEEIKQLQQFQKEDAALTIYEMLQNIFAIFRQDSSSTGWNETIVENLLANVYHQINELKTVLEEKLEKEDFTRGKLMSSLHLKRYYGRILHYLKAKEYSHCAWTIVRVEILRNFYFINRLTGYLRN

SEQ ID NO: 1270 - protein, 166 aa, Homo sapiens
MSYNLLGFLQRSSNFQCQKLLWQLNGRLEYCLKDRMNFDIPEEIKQLQQFQKEDAALTIYEMLQNIFAIFRQDSSSTGWNETIVENLLANVYHQINKLKTVLEEKLEKEDFTRGKLMSSLHLKRYYGRILHYLKAKEYSHCAWTIVRVEILRNFYFINRLTGYLRN

SEQ ID NO: 1271 - protein, 166 aa, Homo sapiens
MSYNLLGFLQRSSNFQCQKLLWQLNGRLEYCLKDRMNFDIPEEIKQLQQFQKEDAALTIYEMLQNIFAIFRQDSSSTGWNETIVENLLANVYHQINNLKTVLEEKLEKEDFTRGKLMSSLHLKRYYGRILHYLKAKEYSHCAWTIVRVEILRNFYFINRLTGYLRN

SEQ ID NO: 1272 - protein, 166 aa, Homo sapiens
MSYNLLGFLQRSSNFQCQKLLWQLNGRLEYCLKDRMNFDIPEEIKQLQQFQKEDAALTIYEMLQNIFAIFRQDSSSTGWNETIVENLLANVYHQINQLKTVLEEKLEKEDFTRGKLMSSLHLKRYYGRILHYLKAKEYSHCAWTIVRVEILRNFYFINRLTGYLRN

SEQ ID NO: 1273 - protein, 166 aa, Homo sapiens
MSYNLLGFLQRSSNFQCQKLLWQLNGRLEYCLKDRMNFDIPEEIKQLQQFQKEDAALTIYEMLQNIFAIFRQDSSSTGWNETIVENLLANVYHQINRLKTVLEEKLEKEDFTRGKLMSSLHLKRYYGRILHYLKAKEYSHCAWTIVRVEILRNFYFINRLTGYLRN

SEQ ID NO: 1274 - protein, 166 aa, Homo sapiens
MSYNLLGFLQRSSNFQCQKLLWQLNGRLEYCLKDRMNFDIPEEIKQLQQFQKEDAALTIYEMLQNIFAIFRQDSSSTGWNETIVENLLANVYHQINSLKTVLEEKLEKEDFTRGKLMSSLHLKRYYGRILHYLKAKEYSHCAWTIVRVEILRNFYFINRLTGYLRN

SEQ ID NO: 1275 - protein, 166 aa, Homo sapiens
MSYNLLGFLQRSSNFQCQKLLWQLNGRLEYCLKDRMNFDIPEEIKQLQQFQKEDAALTIYEMLQNIFAIFRQDSSSTGWNETIVENLLANVYHQINTLKTVLEEKLEKEDFTRGKLMSSLHLKRYYGRILHYLKAKEYSHCAWTIVRVEILRNFYFINRLTGYLRN

SEQ ID NO: 1276 - protein, 166 aa, Homo sapiens
MSYNLLGFLQRSSNFQCQKLLWQLNGRLEYCLKDRMNFDIPEEIKQLQQFQKEDAALTIYEMLQNIFAIFRQDSSSTGWNETIVENLLANVYHQINHDKTVLEEKLEKEDFTRGKLMSSLHLKRYYGRILHYLKAKEYSHCAWTIVRVEILRNFYFINRLTGYLRN

SEQ ID NO: 1277 - protein, 166 aa, Homo sapiens
MSYNLLGFLQRSSNFQCQKLLWQLNGRLEYCLKDRMNFDIPEEIKQLQQFQKEDAALTIYEMLQNIFAIFRQDSSSTGWNETIVENLLANVYHQINHEKTVLEEKLEKEDFTRGKLMSSLHLKRYYGRILHYLKAKEYSHCAWTIVRVEILRNFYFINRLTGYLRN

SEQ ID NO: 1278 - protein, 166 aa, Homo sapiens
MSYNLLGFLQRSSNFQCQKLLWQLNGRLEYCLKDRMNFDIPEEIKQLQQFQKEDAALTIYEMLQNIFAIFRQDSSSTGWNETIVENLLANVYHQINHKKTVLEEKLEKEDFTRGKLMSSLHLKRYYGRILHYLKAKEYSHCAWTIVRVEILRNFYFINRLTGYLRN

SEQ ID NO: 1279 - protein, 166 aa, Homo sapiens
MSYNLLGFLQRSSNFQCQKLLWQLNGRLEYCLKDRMNFDIPEEIKQLQQFQKEDAALTIYEMLQNIFAIFRQDSSSTGWNETIVENLLANVYHQINHNKTVLEEKLEKEDFTRGKLMSSLHLKRYYGRILHYLKAKEYSHCAWTIVRVEILRNFYFINRLTGYLRN

SEQ ID NO: 1280 - protein, 166 aa, Homo sapiens
MSYNLLGFLQRSSNFQCQKLLWQLNGRLEYCLKDRMNFDIPEEIKQLQQFQKEDAALTIYEMLQNIFAIFRQDSSSTGWNETIVENLLANVYHQINHQKTVLEEKLEKEDFTRGKLMSSLHLKRYYGRILHYLKAKEYSHCAWTIVRVEILRNFYFINRLTGYLRN

SEQ ID NO: 1281 - protein, 166 aa, Homo sapiens
MSYNLLGFLQRSSNFQCQKLLWQLNGRLEYCLKDRMNFDIPEEIKQLQQFQKEDAALTIYEMLQNIFAIFRQDSSSTGWNETIVENLLANVYHQINHRKTVLEEKLEKEDFTRGKLMSSLHLKRYYGRILHYLKAKEYSHCAWTIVRVEILRNFYFINRLTGYLRN

SEQ ID NO: 1282 - protein, 166 aa, Homo sapiens
MSYNLLGFLQRSSNFQCQKLLWQLNGRLEYCLKDRMNFDIPEEIKQLQQFQKEDAALTIYEMLQNIFAIFRQDSSSTGWNETIVENLLANVYHQINHSKTVLEEKLEKEDFTRGKLMSSLHLKRYYGRILHYLKAKEYSHCAWTIVRVEILRNFYFINRLTGYLRN

SEQ ID NO: 1283 - protein, 166 aa, Homo sapiens
MSYNLLGFLQRSSNFQCQKLLWQLNGRLEYCLKDRMNFDIPEEIKQLQQFQKEDAALTIYEMLQNIFAIFRQDSSSTGWNETIVENLLANVYHQINHTKTVLEEKLEKEDFTRGKLMSSLHLKRYYGRILHYLKAKEYSHCAWTIVRVEILRNFYFINRLTGYLRN

SEQ ID NO: 1284 - protein, 166 aa, Homo sapiens
MSYNLLGFLQRSSNFQCQKLLWQLNGRLEYCLKDRMNFDIPEEIKQLQQFQKEDAALTIYEMLQNIFAIFRQDSSSTGWNETIVENLLANVYHQINHLKTDLEEKLEKEDFTRGKLMSSLHLKRYYGRILHYLKAKEYSHCAWTIVRVEILRNFYFINRLTGYLRN

SEQ ID NO: 1285 - protein, 166 aa, Homo sapiens
MSYNLLGFLQRSSNFQCQKLLWQLNGRLEYCLKDRMNFDIPEEIKQLQQFQKEDAALTIYEMLQNIFAIFRQDSSSTGWNETIVENLLANVYHQINHLKTELEEKLEKEDFTRGKLMSSLHLKRYYGRILHYLKAKEYSHCAWTIVRVEILRNFYFINRLTGYLRN

SEQ ID NO: 1286 - protein, 166 aa, Homo sapiens
MSYNLLGFLQRSSNFQCQKLLWQLNGRLEYCLKDRMNFDIPEEIKQLQQFQKEDAALTIYEMLQNIFAIFRQDSSSTGWNETIVENLLANVYHQINHLKTKLEEKLEKEDFTRGKLMSSLHLKRYYGRILHYLKAKEYSHCAWTIVRVEILRNFYFINRLTGYLRN

SEQ ID NO: 1287 - protein, 166 aa, Homo sapiens
MSYNLLGFLQRSSNFQCQKLLWQLNGRLEYCLKDRMNFDIPEEIKQLQQFQKEDAALTIYEMLQNIFAIFRQDSSSTGWNETIVENLLANVYHQINHLKTNLEEKLEKEDFTRGKLMSSLHLKRYYGRILHYLKAKEYSHCAWTIVRVEILRNFYFINRLTGYLRN

SEQ ID NO: 1288 - protein, 166 aa, Homo sapiens
MSYNLLGFLQRSSNFQCQKLLWQLNGRLEYCLKDRMNFDIPEEIKQLQQFQKEDAALTIYEMLQNIFAIFRQDSSSTGWNETIVENLLANVYHQINHLKTQLEEKLEKEDFTRGKLMSSLHLKRYYGRILHYLKAKEYSHCAWTIVRVEILRNFYFINRLTGYLRN

SEQ ID NO: 1289 - protein, 166 aa, Homo sapiens
MSYNLLGFLQRSSNFQCQKLLWQLNGRLEYCLKDRMNFDIPEEIKQLQQFQKEDAALTIYEMLQNIFAIFRQDSSSTGWNETIVENLLANVYHQINHLKTRLEEKLEKEDFTRGKLMSSLHLKRYYGRILHYLKAKEYSHCAWTIVRVEILRNFYFINRLTGYLRN

SEQ ID NO: 1290 - protein, 166 aa, Homo sapiens
MSYNLLGFLQRSSNFQCQKLLWQLNGRLEYCLKDRMNFDIPEEIKQLQQFQKEDAALTIYEMLQNIFAIFRQDSSSTGWNETIVENLLANVYHQINHLKTSLEEKLEKEDFTRGKLMSSLHLKRYYGRILHYLKAKEYSHCAWTIVRVEILRNFYFINRLTGYLRN

SEQ ID NO: 1291 - protein, 166 aa, Homo sapiens
MSYNLLGFLQRSSNFQCQKLLWQLNGRLEYCLKDRMNFDIPEEIKQLQQFQKEDAALTIYEMLQNIFAIFRQDSSSTGWNETIVENLLANVYHQINHLKTTLEEKLEKEDFTRGKLMSSLHLKRYYGRILHYLKAKEYSHCAWTIVRVEILRNFYFINRLTGYLRN

SEQ ID NO: 1292 - protein, 166 aa, Homo sapiens
CSYNLLGFLQRSSNFQCQKLLWQLNGRLEYCLKDRMNFDIPEEIKQLQQFQKEDAALTIYEMLQNIFAIFRQDSSSTGWNETIVENLLANVYHQINHLKTVLEEKLEKEDFTRGKLMSSLHLKRYYGRILHYLKAKEYSHCAWTIVRVEILRNFYFINRLTGYLRN

SEQ ID NO: 1293 - protein, 166 aa, Homo sapiens
MSYNLLGFLQRSSNFQCQKLLWQLNGRLEYCLKDRMNFDIPEEIKQLQQFQKEDAALTIYEMLQNIFAIFRQDSSSTGWNETIVENLLANVYHQINHLKTCLEEKLEKEDFTRGKLMSSLHLKRYYGRILHYLKAKEYSHCAWTIVRVEILRNFYFINRLTGYLRN

SEQ ID NO: 1294 - protein, 166 aa, Homo sapiens
MSYNLCGFLQRSSNFQCQKLLWQLNGRLEYCLKDRMNFDIPEEIKQLQQFQKEDAALTIYEMLQNIFAIFRQDSSSTGWNETIVENLLANVYHQINHLKTVLEEKLEKEDFTRGKLMSSLHLKRYYGRILHYLKAKEYSHCAWTIVRVEILRNFYFINRLTGYLRN

SEQ ID NO: 1295 - protein, 166 aa, Homo sapiens
MSYNLLGFLQRSSNFQCQKLLWQLNGRLEYCLKDRMNFDIPEEIKQLQQFQKEDAALTIYEMLQNIFAIFRQDSSSTGWNETIVENLLANVYHQINHCKTVLEEKLEKEDFTRGKLMSSLHLKRYYGRILHYLKAKEYSHCAWTIVRVEILRNFYFINRLTGYLRN

SEQ ID NO: 1296 - protein, 166 aa, Homo sapiens
MSYNLLGFLCRSSNFQCQKLLWQLNGRLEYCLKDRMNFDIPEEIKQLQQFQKEDAALTIYEMLQNIFAIFRQDSSSTGWNETIVENLLANVYHQINHLKTVLEEKLEKEDFTRGKLMSSLHLKRYYGRILHYLKAKEYSHCAWTIVRVEILRNFYFINRLTGYLRN

SEQ ID NO: 1297 - protein, 166 aa, Homo sapiens
MSYNLLGFLQRSSNFQCQKLLWQLNGRLEYCLKDRMNFDIPEEIKQLQQFQKEDAALTIYEMLQNIFAIFRQDSSSTGWNETIVENLLANVYHQINCLKTVLEEKLEKEDFTRGKLMSSLHLKRYYGRILHYLKAKEYSHCAWTIVRVEILRNFYFINRLTGYLRN

SEQ ID NO: 1298 - protein, 166 aa, Homo sapiens
MSYNLLGFLQRSCNFQCQKLLWQLNGRLEYCLKDRMNFDIPEEIKQLQQFQKEDAALTIYEMLQNIFAIFRQDSSSTGWNETIVENLLANVYHQINHLKTVLEEKLEKEDFTRGKLMSSLHLKRYYGRILHYLKAKEYSHCAWTIVRVEILRNFYFINRLTGYLRN

SEQ ID NO: 1299 - protein, 166 aa, Homo sapiens
MSYNLLGFLQRSSNFQCQKLLWQLNGRLEYCLKDRMNFDIPEEIKQLQQFQKEDAALTIYEMLQNIFAIFRQDSSSTGWNETIVENLLANVYHCINHLKTVLEEKLEKEDFTRGKLMSSLHLKRYYGRILHYLKAKEYSHCAWTIVRVEILRNFYFINRLTGYLRN

SEQ ID NO: 1300 - protein, 166 aa, Homo sapiens
MSYNLLGFLQRSSNFCCQKLLWQLNGRLEYCLKDRMNFDIPEEIKQLQQFQKEDAALTIYEMLQNIFAIFRQDSSSTGWNETIVENLLANVYHQINHLKTVLEEKLEKEDFTRGKLMSSLHLKRYYGRILHYLKAKEYSHCAWTIVRVEILRNFYFINRLTGYLRN

SEQ ID NO: 1301 - protein, 166 aa, Homo sapiens
MSYNLLGFLQRSSNFQCQKLLWQLNGRLEYCLKDRMNFDIPEEIKQLQQFQKEDAALTIYEMLQNIFAIFRQDSSSTGWNETIVENLLACVYHQINHLKTVLEEKLEKEDFTRGKLMSSLHLKRYYGRILHYLKAKEYSHCAWTIVRVEILRNFYFINRLTGYLRN

SEQ ID NO: 1302 - protein, 166 aa, Homo sapiens
MSYNLLGFLQRSSNFQCQKLLWQLNGRLEYCLKDRMNFDIPEEIKQLQQFQKEDAALTIYEMLQNIFAIFRQDSSSTGWNETIVENLLANCYHQINHLKTVLEEKLEKEDFTRGKLMSSLHLKRYYGRILHYLKAKEYSHCAWTIVRVEILRNFYFINRLTGYLRN

SEQ ID NO: 1303 - protein, 165 aa, Homo sapiens
CDLPQTHSLGSRRTLMLLAQMRRISLFSCLKDRHDFGFPQEEFGNQFQKAETIPVLHEMIQQIFNLFSTKDSSAAWDETLLDKFYTELHQQLNDLEACVIQGVGVTETPLMKEDSILAVRKYFQRITLYLKEKKYSPCAWEVVRAEIMRSFSLSTNLQESLRSKE

SEQ ID NO: 1304 - protein, 10 aa, Artificial Sequence
  epitope tag
CYPYDVPDYA

SEQ ID NO: 1305 - protein, 8 aa, Artificial Sequence
  epitope tag
DYKDDDDK

SEQ ID NO: 1306 - protein, 11 aa, Artificial Sequence
  epitope tag
CEQKLISEEDL

SEQ ID NO: 1307 - protein, 5 aa, Artificial Sequence
  proteolytic cleavage site
DDDDK

SEQ ID NO: 1308 - protein, 4 aa, Artificial Sequence
  proteolytic cleavage site
IEGR

SEQ ID NO: 1309 - protein, 6 aa, Artificial Sequence
  proteolytic cleavage site
LVPRGS

SEQ ID NO: 1310 - protein, 8 aa, Artificial Sequence
  proteolytic cleavage site
HPFHLVIH

SEQ ID NO: 1311 - protein, 23 aa, Artificial Sequence
  peptide carrier
NYHDIVLALAGVCQSAKLVHQLA

SEQ ID NO: 1312 - protein, 23 aa, Artificial Sequence
  peptide carrier
NYYDITLALAGVCQAAKLVQQFA

SEQ ID NO: 1313 - protein, 23 aa, Artificial Sequence
  peptide carrier
NYYDITLALAGICQSARLVQQLA

SEQ ID NO: 1314 - protein, 23 aa, Artificial Sequence
  peptide carrier
AIYDRTIAFAGICQAVALVQQVA

SEQ ID NO: 1315 - protein, 23 aa, Artificial Sequence
  peptide carrier
KIHLITLSLAGICQSAHLVQQLA

SEQ ID NO: 1316 - protein, 23 aa, Artificial Sequence
  peptide carrier
DPRQQLIALGAVFESAALVDKLA

SEQ ID NO: 1317 - protein, 23 aa, Artificial Sequence
  peptide carrier
LIDNRVLALAGVVQALQQVRQIA

SEQ ID NO: 1318 - protein, 23 aa, Artificial Sequence
  peptide carrier
NLPPIVLAVIGICAAVFLLQQYV

SEQ ID NO: 1319 - protein, 23 aa, Artificial Sequence
  peptide carrier
NYFIVNLALADLCMAAFNAAFNF

SEQ ID NO: 1320 - protein, 23 aa, Artificial Sequence
  peptide carrier
TAFDFNKMLDGVCTYVKGVQQYL

SEQ ID NO: 1321 - protein, 23 aa, Artificial Sequence
  peptide carrier
RAILIPLALAGLCQVARAGDISS

SEQ ID NO: 1322 - protein, 25 aa, Artificial Sequence
  peptide carrier
MRNLTKTSLLLAGLCTAAQMVFVTH

SEQ ID NO: 1323 - protein, 25 aa, Artificial Sequence
  peptide carrier
IELMIVIAIIGILAAIALPAYQEYV

SEQ ID NO: 1324 - protein, 25 aa, Artificial Sequence
  peptide carrier
IELMIVIAIIGILAAIALPAYQDYV

SEQ ID NO: 1325 - protein, 16 aa, Artificial Sequence
  peptide carrier
ASFGFCIGRLCVQDGF

SEQ ID NO: 1326 - protein, 23 aa, Artificial Sequence
  peptide carrier
NYFLVNLAFAEASMAAFNTVVNF

SEQ ID NO: 1327 - protein, 24 aa, Artificial Sequence
  peptide carrier
MNYYDITLALAGICQSARLVQQLA

SEQ ID NO: 1328 - protein, 23 aa, Artificial Sequence
  peptide carrier
MYYDITLALAGICQSARLVQQLA

SEQ ID NO: 1329 - protein, 22 aa, Artificial Sequence
  peptide carrier
MYDITLALAGICQSARLVQQLA

SEQ ID NO: 1330 - protein, 23 aa, Artificial Sequence
  peptide carrier
MRNLTRTSLLLAGLCTAAQMVFV

SEQ ID NO: 1331 - protein, 23 aa, Artificial Sequence
  peptide carrier
NYHDIVLALAGVCQSARLVHQLA

SEQ ID NO: 1332 - protein, 6 aa, Artificial Sequence
  linker
AAAGGM

SEQ ID NO: 1333 - protein, 14 aa, Artificial Sequence
  linker
AAAGGMPPAAAGGM

SEQ ID NO: 1334 - protein, 6 aa, Artificial Sequence
  linker
AAAGGM

SEQ ID NO: 1335 - protein, 9 aa, Artificial Sequence
  linker
PPAAAGGMM

SEQ ID NO: 1336 - protein, 4 aa, Artificial Sequence
  linker
IEGR

SEQ ID NO: 1337 - protein, 6 aa, Artificial Sequence
  linker
GGKGGK

SEQ ID NO: 1338 - DNA, 92 bp, Artificial Sequence
  primer
agcttgccaccatgtgcgacctgccccagacccacagcctgggcaaccgccgcgccctgatcctgctggcccagatgcgccgcatcagcccc

SEQ ID NO: 1339 - DNA, 79 bp, Artificial Sequence
  primer
gcggcgcatctgggccagcaggatcagggcgcggcggttgcccaggctgtgggtctggggcaggtcgcacatggtggca

SEQ ID NO: 1340 - DNA, 88 bp, Artificial Sequence
  primer
ttcagctgcctgaaggaccgccacgacttcggcttcccccaggaggagttcgacggcaaccagttccagaaggcccaggccatcagcg

SEQ ID NO: 1341 - DNA, 88 bp, Artificial Sequence
  primer
cctgggccttctggaactggttgccgtcgaactcctcctgggggaagccgaagtcgtggcggtccttcaggcagctgaaggggctgat

SEQ ID NO: 1342 - DNA, 86 bp, Artificial Sequence
  primer
tgctgcacgagatgatccagcagaccttcaacctgttcagcaccaaggacagcagcgccgcctgggacgagagcctgctggagaag

SEQ ID NO: 1343 - DNA, 85 bp, Artificial Sequence
  primer
aggctctcgtcccaggcggcgctgctgtccttggtgctgaacaggttgaaggtctgctggatcatctcgtgcagcacgctgatgg

SEQ ID NO: 1344 - DNA, 91 bp, Artificial Sequence
  primer
ttctacaccgagctgtaccagcagctgaacgacctggaggcctgcgtgatccaggaggtgggcgtggaggagacccccctgatgaacgtgg

SEQ ID NO: 1345 - DNA, 92 bp, Artificial Sequence
  primer
tcaggggggtctcctccacgcccacctcctggatcacgcaggcctccaggtcgttcagctgctggtacagctcggtgtagaacttctccagc

SEQ ID NO: 1346 - DNA, 87 bp, Artificial Sequence
  primer
acagcatcctggccgtgaagaagtacttccagcgcatcaccctgtacctgaccgagaagaagtacagcccctgcgcctgggaggtgg

SEQ ID NO: 1347 - DNA, 87 bp, Artificial Sequence
  primer
aggcgcaggggctgtacttcttctcggtcaggtacagggtgatgcgctggaagtacttcttcacggccaggatgctgtccacgttca

SEQ ID NO: 1348 - DNA, 75 bp, Artificial Sequence
  primer
tgcgcgccgagatcatgcgcagcttcagcctgagcaccaacctgcaggagcgcctgcgccgcaaggagtaatgag

SEQ ID NO: 1349 - DNA, 88 bp, Artificial Sequence
  primer
aattctcattactccttgcggcgcaggcgctcctgcaggttggtgctcaggctgaagctgcgcatgatctcggcgcgcaccacctccc

SEQ ID NO: 1350 - DNA, 66 bp, Artificial Sequence
  primer
gccctggtggtgctgagctgcaagagcagctgcagcctgggctgcgacctgccccagacccacagc

SEQ ID NO: 1351 - DNA, 67 bp, Artificial Sequence
  primer
tataaagcttgccaccatggccctgcccttcgccctgatgatggccctggtggtgctgagctgcaag

SEQ ID NO: 1352 - DNA, 66 bp, Artificial Sequence
  primer
gccctgctgctgtgcttcagcaccaccgccctgagcatgagctgcgacctgccccagacccacagc

SEQ ID NO: 1353 - DNA, 67 bp, Artificial Sequence
  primer
tataaagcttgccaccatgaccaacaagtgcctgctgcagatcgccctgctgctgtgcttcagcacc

SEQ ID NO: 1354 - DNA, 34 bp, Artificial Sequence
  primer
tatagaattctcattactccttgcggcgcaggcg

SEQ ID NO: 1355 - protein, 183 aa, Artificial Sequence
  synthetic interferon
MALFALLALVTSSSSLGCDLPQTHSLGSRRTLMLLAQMRRISPFSCLKDRHDFGFPQEEFDGNQFQKAQAISVLHEMLQQIFNLFSTKDSSAAWDETLLEKFYTELYQQLNDLEACVIQEVGVEETPLMNEDSILAVKKYFQRITLYLKEKKYSPCAWEVVRAEIMRSFSLSTNLQERLRSKD

SEQ ID NO: 1356 - protein, 167 aa, Artificial Sequence
  consensus interferon
MCDLPQTHSLGNRRALILLAQMRRISPFSCLKDRHDFGFPQEEFDGNQFQKAQAISVLHEMIQQTFNLFSTKDSSAAWDESLLEKFYTELYQQLNDLEACVIQEVGVEETPLMNVDSILAVKKYFQRITLYLTEKKYSPCAWEVVRAEIMRSFSLSTNLQERLRRKE

SEQ ID NO: 1357 - protein, 166 aa, Homo Sapiens [sequence omitted]

SEQ ID NO: 1358 - protein, 189 aa, Homo Sapiens
MALPFALMMALVVLSCKSSCSLGCNLSQTHSLNNRRTLMLMAQMRRISPFSCLKDRHDFEFPQEEFDGNQFQKAQAISVLHEMMQQTFNLFSTKNSSAAWDETLLEKFYIELFQQMNDLEACVIQEVGVEETPLMNEDSILAVKKYFQRITLYLMEKKYSPCAWEVVRAEIMRSFSFSTNLQKRLRRKD

SEQ ID NO: 1359 - protein, 187 aa, Homo Sapiens
MTNKCLLQIALLLCFSTTALSMSYNLLGFLQRSSNFQCQKLLWQLNGRLEYCLKDRMNFDIPEEIKQLQQFQKEDAALTIYEMLQNIFAIFRQDSSSTGWNETIVENLLANVYHQINHLKTVLEEKLEKEDFTRGKLMSSLHLKRYYGRILHYLKAKEYSHCAWTIVRVEILRNFYFINRLTGYLRN

SEQ ID NO: 1360 - protein, 195 aa, Homo Sapiens
MALLFPLLAALVMTSYSPVGSLGCDLPQNHGLLSRNTLVLLHQMRRISPFLCLKDRRDFRFPQEMVKGSQLQKAHVMSVLHEMLQQIFSLFHTERSSAAWNMTLLDQLHTGLHQQLQHLETCLLQVVGEGESAGAISSPALTLRRYFQGIRVYLKEKKYSDCAWEVVRMEIMKSLFLSTNMQERLRSKDRDLGSS

SEQ ID NO: 1361 - protein, 60 aa, Artificial Sequence
  synthetic interferon
MIQQTFNLFSTKDSSAAWDESLLEKFYTELYQQLNDLEACVIQEVGVTETPLMNVDSILA

SEQ ID NO: 1362 - protein, 60 aa, Artificial Sequence
  consensus interferon
MIQQTFNLFSTKDSSAAWDESLLEKFYTELYQQLNDLEACVIQEVGVEETPLMNVDSILA

SEQ ID NO: 1363 - protein, 60 aa, Artificial Sequence
  variant interferon
MIQQTFNLFSTKNSSAAWDESLLEKFYTELYQQLNDLEACVIQEVGVEETPLMNVDSILA

SEQ ID NO: 1364 - protein, 60 aa, Artificial Sequence
  variant interferon
MIQQTFNLFSTKDSSAAWNESLLEKFYTELYQQLNDLEACVIQEVGVEETPLMNVDSILA

SEQ ID NO: 1365 - protein, 60 aa, Artificial Sequence; identical to SEQ ID NO: 1361
  variant interferon

SEQ ID NO: 1366 - protein, 60 aa, Artificial Sequence
  variant interferon
MIQQTFNLFSTKDSSAAWDESLLEKFYTELYQQLNDLEACVIQEVGVNETPLMNVDSILA

SEQ ID NO: 1367 - protein, 60 aa, Artificial Sequence
  variant interferon
MIQQTFNLFSTKNSSAAWNESLLEKFYTELYQQLNDLEACVIQEVGVEETPLMNVDSILA

SEQ ID NO: 1368 - protein, 60 aa, Artificial Sequence
  variant interferon
MIQQTFNLFSTKNSSAAWDESLLEKFYTELYQQLNDLEACVIQEVGVTETPLMNVDSILA

SEQ ID NO: 1369 - protein, 60 aa, Artificial Sequence
  variant interferon
MIQQTFNLFSTKDSSAAWNESLLEKFYTELYQQLNDLEACVIQEVGVTETPLMNVDSILA

SEQ ID NO: 1370 - protein, 60 aa, Artificial Sequence
  variant interferon
MIQQTFNLFSTKNSSAAWDESLLEKFYTELYQQLNDLEACVIQEVGVNETPLMNVDSILA

SEQ ID NO: 1371 - protein, 60 aa, Artificial Sequence
  variant interferon
MIQQTFNLFSTKDSSAAWNESLLEKFYTELYQQLNDLEACVIQEVGVNETPLMNVDSILA

SEQ ID NO: 1372 - protein, 60 aa, Artificial Sequence
  variant interferon
MIQQTFNLFSTKNSSAAWNESLLEKFYTELYQQLNDLEACVIQEVGVTETPLMNVDSILA

SEQ ID NO: 1373 - protein, 60 aa, Artificial Sequence
  variant interferon
MIQQTFNLFSTKNSSAAWNESLLEKFYTELYQQLNDLEACVIQEVGVNETPLMNVDSILA

SEQ ID NO: 1374 - DNA, 120 bp, Artificial Sequence
  synthetic interferon
aggacagcagcgccgcctgggacgagagcctgctggagaagttctacaccgagctgtaccagcagctgaacgacctggaggcctgcgtgatccaggaggtgggcgtgaacgagacccccc

SEQ ID NO: 1375 - DNA, 120 bp, Artificial Sequence
  consensus interferon
aggacagcagcgccgcctgggacgagagcctgctggagaagttctacaccgagctgtaccagcagctgaacgacctggaggcctgcgtgatccaggaggtgggcgtggaggagacccccc

SEQ ID NO: 1376 - DNA, 120 bp, Artificial Sequence
  variant interferon
agaacagcagcgccgcctgggacgagagcctgctggagaagttctacaccgagctgtaccagcagctgaacgacctggaggcctgcgtgatccaggaggtgggcgtggaggagacccccc

SEQ ID NO: 1377 - DNA, 120 bp, Artificial Sequence
  variant interferon
aggacagcagcgccgcctggaacgagagcctgctggagaagttctacaccgagctgtaccagcagctgaacgacctggaggcctgcgtgatccaggaggtgggcgtggaggagacccccc

SEQ ID NO: 1378 - DNA, 120 bp, Artificial Sequence; identical to SEQ ID NO: 1374
  variant interferon

SEQ ID NO: 1379 - DNA, 120 bp, Artificial Sequence
  variant interferon
aggacagcagcgccgcctgggacgagagcctgctggagaagttctacaccgagctgtaccagcagctgaacgacctggaggcctgcgtgatccaggaggtgggcgtgaccgagacccccc

SEQ ID NO: 1380 - DNA, 120 bp, Artificial Sequence
  variant interferon
agaacagcagcgccgcctggaacgagagcctgctggagaagttctacaccgagctgtaccagcagctgaacgacctggaggcctgcgtgatccaggaggtgggcgtggaggagacccccc

SEQ ID NO: 1381 - DNA, 120 bp, Artificial Sequence
  variant interferon
agaacagcagcgccgcctgggacgagagcctgctggagaagttctacaccgagctgtaccagcagctgaacgacctggaggcctgcgtgatccaggaggtgggcgtgaacgagacccccc

SEQ ID NO: 1382 - DNA, 120 bp, Artificial Sequence
  variant interferon
agaacagcagcgccgcctgggacgagagcctgctggagaagttctacaccgagctgtaccagcagctgaacgacctggaggcctgcgtgatccaggaggtgggcgtgaccgagacccccc

SEQ ID NO: 1383 - DNA, 120 bp, Artificial Sequence
  variant interferon
aggacagcagcgccgcctggaacgagagcctgctggagaagttctacaccgagctgtaccagcagctgaacgacctggaggcctgcgtgatccaggaggtgggcgtgaacgagacccccc

SEQ ID NO: 1384 - DNA, 120 bp, Artificial Sequence
  variant interferon
aggacagcagcgccgcctggaacgagagcctgctggagaagttctacaccgagctgtaccagcagctgaacgacctggaggcctgcgtgatccaggaggtgggcgtgaccgagacccccc

SEQ ID NO: 1385 - DNA, 120 bp, Artificial Sequence
  variant interferon
agaacagcagcgccgcctggaacgagagcctgctggagaagttctacaccgagctgtaccagcagctgaacgacctggaggcctgcgtgatccaggaggtgggcgtgaacgagacccccc

SEQ ID NO: 1386 - DNA, 120 bp, Artificial Sequence
  variant interferon
agaacagcagcgccgcctggaacgagagcctgctggagaagttctacaccgagctgtaccagcagctgaacgacctggaggcctgcgtgatccaggaggtgggcgtgaccgagacccccc

SEQ ID NO: 1387 - protein, 189 aa, Artificial Sequence
  synthetic interferon
MALKFALQIALVVLSSTSALSLGCDLPQTHSLGNRRALILLAQMRRISPFSCLKDRHDFGFPQEEFDGNQFQKAQAISVLHEMIQQTFNLFSTKDSSAAWDESLLEKFYTELYQQLNDLEACVIQEVGVEETPLMNVDSILAVKKYFQRITLYLTEKKYSPCAWEVVRAEIMRSFSLSTNLQERLRRKE

SEQ ID NO: 1388 - protein, 189 aa, Artificial Sequence
  variant interferon
MALPFALMMALVVLSCKSSCSLGCDLPQTHSLGNRRALILLAQMRRISPFSCLKDRHDFGFPQEEFDGNQFQKAQAISVLHEMIQQTFNLFSTKDSSAAWDESLLEKFYTELYQQLNDLEACVIQEVGVEETPLMNVDSILAVKKYFQRITLYLTEKKYSPCAWEVVRAEIMRSFSLSTNLQERLRRKE

SEQ ID NO: 1389 - protein, 189 aa, Artificial Sequence
  variant interferon
MTNKCLLQIALLLCFSTTALSMSCDLPQTHSLGNRRALILLAQMRRISPFSCLKDRHDFGFPQEEFDGNQFQKAQAISVLHEMIQQTFNLFSTKDSSAAWDESLLEKFYTELYQQLNDLEACVIQEVGVEETPLMNVDSILAVKKYFQRITLYLTEKKYSPCAWEVVRAEIMRSFSLSTNLQERLRRKE

SEQ ID NO: 1390 - protein, 60 aa, Artificial Sequence
  synthetic interferon
YEMLQNIFAIFRQDSSSTGWNETIVENLLANVYHQINHLKTVLEEKLEKTDFTRGKLMSS

SEQ ID NO: 1391 - protein, 60 aa, Homo sapiens
YEMLQNIFAIFRQDSSSTGWNETIVENLLANVYHQINHLKTVLEEKLEKEDFTRGKLMSS

SEQ ID NO: 1392 - protein, 60 aa, Artificial Sequence
  variant interferon
YEMLQNIFAIFRQDNSSTGWNETIVENLLANVYHQINHLKTVLEEKLEKEDFTRGKLMSS

SEQ ID NO: 1393 - protein, 60 aa, Artificial Sequence; identical to SEQ ID NO: 1390
  variant interferon

SEQ ID NO: 1394 - protein, 60 aa, Artificial Sequence
  variant interferon
YEMLQNIFAIFRQDSSSTGWNETIVENLLANVYHQINHLKTVLEEKLEKNDTTRGKLMSS

SEQ ID NO: 1395 - protein, 60 aa, Artificial Sequence
  variant interferon
YEMLQNIFAIFRQDNSSTGWNETIVENLLANVYHQINHLKTVLEEKLEKTDFTRGKLMSS

SEQ ID NO: 1396 - protein, 60 aa, Artificial Sequence
  variant interferon
YEMLQNIFAIFRQDNSSTGWNETIVENLLANVYHQINHLKTVLEEKLEKNDTTRGKLMSS

SEQ ID NO: 1397 - protein, 60 aa, Artificial Sequence
  synthetic interferon
HEMLQQIFSLFHTENSSAAWNMTLLDQLHTGLHQQLQHLETCLLQVVGEGESAGAISSPA

SEQ ID NO: 1398 - protein, 60 aa, Homo sapiens
HEMLQQIFSLFHTERSSAAWNMTLLDQLHTGLHQQLQHLETCLLQVVGEGESAGAISSPA

SEQ ID NO: 1399 - protein, 60 aa, Artificial Sequence; identical to SEQ ID NO: 1397
  variant interferon

SEQ ID NO: 1400 - protein, 60 aa, Artificial Sequence
  variant interferon
HEMLQQIFSLFHTERSSAAWNMTLLDQLHTGLHQQLQHLETCLLQVVGETESAGAISSPA

SEQ ID NO: 1401 - protein, 60 aa, Artificial Sequence
  variant interferon
HEMLQQIFSLFHTERSSAAWNMTLLDQLHTGLHQQLQHLETCLLQVVGENESAGAISSPA

SEQ ID NO: 1402 - protein, 60 aa, Artificial Sequence
  variant interferon
HEMLQQIFSLFHTENSSAAWNMTLLDQLHTGLHQQLQHLETCLLQVVGENESAGAISSPA

SEQ ID NO: 1403 - protein, 60 aa, Artificial Sequence
  variant interferon
HEMLQQIFSLFHTENSSAAWNMTLLDQLHTGLHQQLQHLETCLLQVVGETESAGAISSPA

SEQ ID NO: 1404 - protein, 143 aa, Homo sapiens
QDPYVKEAENLKKYFNAGHSDVADNGTLFLGILKNWKEESDRKIMQSQIVSFYFKLFKNFKDDQSIQKSVETIKEDMNVKFFNSNKKKRDDFEKLTNYSVTDLNVQRKAIHELIQVMAELSPAAKTGKRKRSQMLFRGRRASQ

SEQ ID NO: 1405 - protein, 191 aa, Homo sapiens
FPTIPLSRLFDNAMLRARRLYQLAYDTYQEFGEAYILKEQKYSFLQNPQTSLCFSESIPTPSNREETQQKSNLELLRISLLLIQSWLEPVQFLRSVFANSLVYGASDSNVYDLLKDLEEGIQTLMGRLEDGSPRTGQIFKQTYSKFDTNSHNDDALLKNYGLLYCFRKDMDKVETFLRIVQCRSVEGSCGF
